(19) United States
(12) Patent Application Publication
(10) Pub. No.: US 2022/0265708 A1
(43) Pub. Date: Aug. 25, 2022

(54) Modified Cell Expansion and Uses Thereof

(71) Applicants: Innovative Cellular Therapeutics, Inc., Rockville, MD (US); Innovative Cellular Therapeutics Co., Ltd., Shanghai, MD (US)

(72) Inventors: Lei Xiao, Rockville, MD (US); Chengfei Pu, Shanghai (CN); Zhiyuan Cao, Shanghai (CN); Zhao Wu, Shanghai (CN); Li Mao, Shanghai (CN); Mao Bi, Shanghai (CN)

(73) Assignees: Innovative Cellular Therapeutics, Inc., Rockville, MD (US); Innovative Cellular Therapeutics Co., Ltd., Shanghai, MD (US)

(21) Appl. No.: 16/961,418

(22) PCT Filed: Jan. 10, 2019
(86) PCT No.: PCT/US2019/013068

§ 371 Date: Jul. 10, 2020

Related U.S. Application Data
(60) Provisional application No. 62/721,791, filed on Aug. 23, 2018.
(60) Provisional application No. 62/690,892, filed on Jun. 27, 2018.
(60) Provisional application No. 62/687,059, filed on Jun. 19, 2018.
(60) Provisional application No. 62/678,836, filed on May 31, 2018.
(60) Provisional application No. 62/659,233, filed on Apr. 18, 2018.
(60) Provisional application No. 62/659,114, filed on Apr. 17, 2018.
(60) Provisional application No. 62/626,781, filed on Feb. 6, 2018.
(60) Provisional application No. 62/622,601, filed on Jan. 26, 2018.
(60) Provisional application No. 62/616,609, filed on Jan. 12, 2018.
(60) Provisional application No. 62/616,079, filed on Jan. 11, 2018.

(51) Int. Cl. A61K 35/17; C12N 5/0783; C12N 15/62; C12N 15/86

(52) U.S. Cl. CPC A61K 35/17; C12N 5/0636; C12N 15/625; C12N 15/86; C12N 2740/15043

(57) ABSTRACT

The present disclosure relates to compositions and methods for enhancing T cell response and/or CAR cell expansion in vivo and/or in vitro. For example, a cell may comprise a first chimeric antigen receptor (CAR) and a second CAR, wherein a binding domain of the first CAR binds a first antigen, and a binding domain of the second CAR binds a second antigen. The first antigen is different from the second antigen. In embodiments, the first CAR may recognize a surface molecule of a blood cell.

### CROSS REFERENCE TO RELATED PATENT APPLICATIONS

[0001] This application claims the benefit of U.S. application Ser. No. 16/146,218, filed on Sep. 28, 2018; U.S. Provisional Application 62/721,791, filed on Aug. 23, 2018; U.S. Provisional Application 62/690,892, filed on Jun. 27, 2018; U.S. Provisional Application 62/659,233, filed on Apr. 18, 2018; U.S. Provisional Application 62/687,059, filed on Jun. 19, 2018; U.S. Provisional Application 62/678,836, filed on May 31, 2018; U.S. Provisional Application No. 62/659,114, filed on Apr. 17, 2018; U.S. Provisional Application 62/626,781, filed on Feb. 6, 2018; U.S. Provisional 62/622,601, filed on Jan. 26, 2018; and U.S. Provisional Application No. 62/616,609, filed on Jan. 12, 2018; U.S. Provisional Application 62/616,079, filed on Jan. 11, 2018, which are hereby incorporated by reference in their entirety.

### SEQUENCE LISTING INFORMATION

[0002] A computer readable textfile, entitled “Sequence Listing.txt,” created on or about Dec. 18, 2018 with a file size of about 949 KB, contains the sequence listing for this application and is hereby incorporated by reference in its entirety.

### TECHNICAL FIELD

[0003] The present disclosure relates to compositions and methods for expanding modified cells including modified T cells, and uses thereof in the treatment of diseases, including cancer.

### BACKGROUND

[0004] Chimeric Antigen Receptor (CAR) T cell therapy has achieved good clinical efficacy in cancer such as B-ALL/CLL/lymphoma. However, progress is relatively slow for treatment of solid tumors. For CAR T cell therapy to be effective, long-term maintenance of CAR T cells in a patient is important for the prognosis of the patient in the treatment of tumors. For example, if the long-term presence of CAR T cells can be maintained, this technology may effectively reduce tumor recurrence.

[0005] Cancer is known as malignant tumors involving abnormal cell growth with the potential to invade or spread to other parts of the body. In humans, there are more than one hundred types of cancer. One example is breast cancer occurring in the epithelial tissue of the breast. Since breast cancer cells lose the characteristics of normal cells, the connection between breast cancer cells is lost. Once cancer cells are exfoliated, they spread over the entire body via the blood and/or lymph systems and therefore become life-threatening. Currently, breast cancer has become one of the common threats to women's physical and mental health. Although immunotherapy (e.g., CAR T) has been proven to be effective for treating cancer, there is still a need to improve immunotherapy so that it is more effective for certain cancer such as solid tumors.

### SUMMARY

[0006] Since a patient can survive the depletion of B cells, B cells of the patient may be used to expand the CAR T cells in the patient using the first antigen binding domain. Accordingly, more CAR T cells may be timely expanded in the patient, increasing the potency of CAR T cells. The timely expanded CAR T cells in the patient may increase the chances for the CAR T cells to come in contact with tumor cells, especially solid tumor cells having the antigen that the second CAR binds.

[0007] The present disclosure describes genetically modified cells, such as T cells, that include two different antigen binding domains: a first antigen binding domain for expanding the modified cell, and a second antigen binding domain for killing a target cell, such as a tumor cell. For example, the first antigen binding domain binds a surface marker, such as a surface antigen, of B cells, and the second antigen binding domain binds the target antigen of tumor cells. The two antigen binding domains can be on the same CAR molecule, on different CAR molecules, or on a CAR and a T cell receptor (TCR). In embodiments, the first binding domain binds a cell surface molecule of a white cell, while the second binding domain binds an antigen that is different from the cell surface molecule of a white cell and is a tumor antigen.

[0008] The two antigen binding domains can be encoded by a single nucleic acid or more than one nucleic acids. In embodiments, the cell includes a modified T cell, for example a CAR T cell. In embodiments, the target cell includes a cell of a solid tumor.

[0009] The present disclosure also describes one or more nucleic acids encoding a first CAR and a second CAR or TCR. The first CAR includes the first antigen binding domain and the second CAR or TCR includes the second antigen binding domain. In embodiments, the first CAR and the second CAR or TCR are expressed as separate polypeptides and encoded by at least two separate nucleic acids. In embodiments, a single CAR contains at least two antigen binding domains and is encoded by a single nucleic acid. Embodiments described herein relate to vectors comprising a nucleic acid described herein and to cells comprising a nucleic acid described herein.

[0010] Moreover, the present disclosure describes the release of cytokines in response to the introduction of the first CAR and second CAR or TCR. In embodiments, the cytokines are IL-6 and IFN-γ.

[0011] This Summary is not intended to identify key features or essential features of the claimed subject matter, nor is it intended to be used to limit the scope of the claimed subject matter.

### BRIEF DESCRIPTION OF THE DRAWINGS

[0012] The Detailed Description is described with reference to the accompanying figures. The use of the same reference numbers in different figures indicates similar or identical items.

[0013] FIG. 1 is a schematic diagram of an exemplary CAR molecule and a portion of the cell membrane.

[0014] FIG. 2 is a schematic diagram of a nucleic acid construct including two CAR molecules and structures of a T cell having two different CAR molecules.

[0015] FIG. 3 is a schematic diagram showing an exemplary portion of a cell membrane comprising two CAR molecules.

[0016] FIG. 4 is a schematic diagram showing an exemplary portion of a cell membrane comprising a bispecific CAR molecule.

[0017] FIG. 5 is a schematic diagram showing an exemplary portion of a cell membrane comprising a bispecific CAR molecule and a T cell receptor (TCR).

[0018] FIG. 6 displays flow cytometry results showing T cells expressing anti-CD19 CAR and anti-MUC1 CAR.

[0019] FIG. 7 shows functional analysis of T cells expressing anti-CD19 CAR and anti-MUC1 CAR.

[0020] FIG. 8 displays a histogram showing T cell response to co-culturing with various substrate cells.

[0021] FIG. 9 displays a histogram showing T cell response to co-culturing with various substrate cells.

[0022] FIG. 10 displays flow cytometry analysis showing expression of anti-TSHR CAR molecules on T cells (Gated by a single live cell). Anti-TSHR CAR T cells were constructed, and the expression of CAR molecules was detected by flow cytometry. Compared to non-transduced T cells, expression of CAR molecules was observed.

[0023] FIG. 11 displays flow cytometry analysis showing overexpression of TSHR on T cells (Gated by a single live cell). Lentiviral vectors were used to construct antigen over-expressed T cells (TSHR). The expression of TSHR molecules on the surface of T cells was observed (IgG on the left and anti-TSHR FITC on the right).

[0024] FIG. 12 shows cytokine release (IL-2) in mouse peripheral blood.

[0025] FIG. 13 shows cytokine release (IFN-γ) in mouse peripheral blood.

[0026] FIG. 14 shows cytokine release (IL-4) in mouse peripheral blood.

[0027] FIG. 15 shows CAR/CD3 cell ratios were increased as compared to control in mouse peripheral blood.

[0028] FIG. 16 shows changes in the number of copies of CAR molecules with time (days) after infusion of CAR T cells to patient A.

[0029] FIG. 17 shows changes in the number of copies of CAR molecules with time (days) after infusion of CAR T cells to patient B.

[0030] FIG. 18 shows changes in the number of copies of CAR molecules with time (days) after infusion of CAR T cells to patient C.

[0031] FIG. 19 shows changes in the number of copies of CAR molecules with time (days) after infusion of CAR T cells to patient D.

[0032] FIG. 20 shows changes in the number of copies of CAR molecules with time (days) after infusion of CAR T cells to patient E.

[0033] FIG. 21 illustrates an example of a pair of ZFNs targeting an exemplary exon of a gene.

[0034] FIGS. 22, 23, 24, and 25 show sequencing results for ZFNs that target various gene fragments and are amplified by PCR. Double sequencing signals were observed for the ZFNs, and bottom portions of double sequencing signals were circulated with black boxes, suggesting that the targeting gene was introduced with a mutation. The higher the density of the double sequencing signals, the higher the editing efficiency.

[0035] FIGS. 26, 27, 28, 29, and 30 show sequencing results for ZFNs that target various gene fragments and are amplified by PCR. Multiple sequencing signals were observed for the ZFNs, and bottom portions of multiple sequencing signals were circulated with black boxes, suggesting that the targeting gene was introduced with a mutation. The higher the density of the multiple sequencing signals, the higher the editing efficiency is. Labels above the sequencing results represent corresponding ZFN combinations, and target sequences identified by ZFNs were circulated with black boxes.

[0036] FIG. 31 shows flow cytometry of B2m expression of 293T cell with or without gRNA treatment.

[0037] FIGS. 32, 33, 34, and 35 show flow cytometry results of human leukocytes/murine leukocytes in different groups. The cells were derived from all living cells after the mouse peripheral blood lysis. The horizontal axis represents the fluorescence intensity of hCD45 corresponding staining, and the vertical axis represents the fluorescence intensity of mCD45 corresponding staining.

[0038] FIGS. 36, 37, 38, and 39 show flow cytometry results of T cells/human leukocytes. The cells were derived from human leukocyte hCD45 in FIGS. 32-35, the horizontal axis represents the fluorescence intensity of CD3 corresponding staining, and the vertical axis represents the fluorescence intensity of CD19 corresponding staining.

[0039] FIG. 40 shows release of cytokines IL-2 and IFN-γ of each of the mice. Peripheral blood samples were obtained from the mice, and the supernatant were provided in Table 13.

[0040] FIGS. 41, 42, 43, and 44 shows proportion of CD8/CD4 in mouse peripheral blood T cells. The cells are derived from CD3 in FIGS. 36-39, the horizontal axis represents the fluorescence intensity of CD4 corresponding staining, and the vertical axis represents the fluorescence intensity of CD8 corresponding staining. Detailed results are provided in Table 14.

[0041] FIG. 45 shows results of T cell/mouse white blood cell. It can be seen from the statistics and the data in Table 19 that the ratios of white blood cells in the T cells/mouse of the NT group, the 2407 group, and the Nalm6+2407+1204 group are similar, and the ratios of the white blood cells of the 2407+1204 group to the other four groups of T cells/mouse is higher.

[0042] FIG. 46 shows results of CD8/CD4. It can be seen from the statistics data in Table 20 that there is no significant difference in the ratio of the four groups of CD8/CD4.

[0043] FIG. 47 shows cytokine data from peripheral blood samples from mice and the supernatant.

[0044] FIG. 48 shows tumor volumes change in mice in response to infusion with different cell groups.

[0045] FIG. 49 shows changes in the numbers of copies of CAR molecules with time (days) after infusion of CAR T cells to patient F. The numbers of copies of CAR molecules include numbers of total copies of CAR and copies of individual CARs (i.e., Anti-CD19 CAR and Anti-tMUC1 CAR).

[0046] FIG. 50 shows cytokine release results of patient F.

[0047] FIG. 51 shows comparison of IL-6 release between patient C and patient F.

[0048] FIG. 52 shows comparison of IFN-γ release between patient C and patient F.

### DETAILED DESCRIPTION

[0049] Unless defined otherwise, all technical and scientific terms used herein have the same meaning as commonly understood by those of ordinary skill in the art to which the disclosure belongs. Although any method and material similar or equivalent to those described herein can be used in the practice or testing of the present disclosure, preferred methods and materials are described. For the purposes of the present disclosure, the following terms are defined below.

[0050] The articles “a” and “an” are used herein to refer to one or to more than one (i.e., to at least one) of the grammatical object of the article. By way of example, “an element” means one element or more than one element.

[0051] By “about” is meant a quantity, level, value, number, frequency, percentage, dimension, size, amount, weight or length that varies by as much as 20, 15, 10, 9, 8, 7, 6, 5, 4, 3, 2 or 1% to a reference quantity, level, value, number, frequency, percentage, dimension, size, amount, weight or length.

[0052] The term “activation,” as used herein, refers to the state of a cell that has been sufficiently stimulated to induce detectable cellular proliferation. Activation can also be associated with induced cytokine production and detectable effector functions. The term “activated T cells” refers to, among other things, T cells that are undergoing cell division.

[0053] The term “antibody” is used in the broadest sense and refers to monoclonal antibodies (including full length monoclonal antibodies), polyclonal antibodies, multi-specific antibodies (e.g., bispecific antibodies), and antibody fragments so long as they exhibit the desired biological activity or function. The antibodies in the present disclosure may exist in a variety of forms including, for example, polyclonal antibodies, monoclonal antibodies, Fv, Fab and F(ab)₂, as well as single chain antibodies and humanized antibodies (Harlow et al., 1999, In: Using Antibodies: A Laboratory Manual, Cold Spring Harbor Laboratory Press, NY; Harlow et al., 1989, In: Antibodies: A Laboratory Manual, Cold Spring Harbor, N.Y.; Houston et al., 1988, Proc. Natl. Acad. Sci. USA 85:5879-5883; Bird et al., 1988, Science 242:423-426).

[0054] The term “antibody fragments” refers to a portion of a full-length antibody, for example, the antigen binding or variable region of the antibody. Other examples of antibody fragments include Fab, Fab′, F(ab′)2, and Fv fragments; diabodies; linear antibodies; single-chain antibody molecules; and multi-specific antibodies formed from antibody fragments.

[0055] The term “Fv” refers to the minimum antibody fragment which contains a complete antigen-recognition and -binding site. This fragment consists of a dimer of one heavy- and one light-chain variable region domain in tight, non-covalent association. From the folding of these two domains emanates six hypervariable loops (3 loops each from the H and L chain) that contribute amino acid residues for antigen binding and confer antigen binding specificity to the antibody. However, even a single variable domain (or half of an Fv including only three complementarity determining regions (CDRs) specific for an antigen) has the ability to recognize and bind antigen, although at a lower affinity than the entire binding site (the dimer).

[0056] An “antibody heavy chain,” as used herein, refers to the larger of the two types of polypeptide chains present in all antibody molecules in their naturally occurring conformations. An “antibody light chain,” as used herein, refers to the smaller of the two types of polypeptide chains present in all antibody molecules in their naturally occurring conformations. K and A light chains refer to the two major antibody light chain isotypes.

[0057] The term “synthetic antibody” refers to an antibody which is generated using recombinant DNA technology, such as, for example, an antibody expressed by a bacteriophage. The term also includes an antibody which has been generated by the synthesis of a DNA molecule encoding the antibody and the expression of the DNA molecule to obtain the antibody or to obtain an amino acid encoding the antibody. The synthetic DNA is obtained using technology that is available and well known in the art.

[0058] The term “antigen” refers to a molecule that provokes an immune response, which may involve either antibody production, or the activation of specific immunologically-competent cells, or both. Antigens include any macromolecule, including all proteins or peptides, or molecules derived from recombinant or genomic DNA. For example, DNA including a nucleotide sequence or a partial nucleotide sequence encoding a protein or peptide that elicits an immune response, and therefore, encodes an “antigen” as the term is used herein. An antigen need not be encoded solely by a full-length nucleotide sequence of a gene. An antigen can be generated, synthesized or derived from a biological sample including a tissue sample, a tumor sample, a cell, or a biological fluid.

[0059] The term “anti-tumor effect” as used herein, refers to a biological effect associated with a decrease in tumor volume, a decrease in the number of tumor cells, a decrease in the number of metastases, decrease in tumor cell proliferation, decrease in tumor cell survival, an increase in life expectancy of a subject having tumor cells, or amelioration of various physiological symptoms associated with the cancerous condition. An “anti-tumor effect” can also be manifested by the ability of the peptides, polynucleotides, cells, and antibodies in the prevention of the occurrence of tumor in the first place.

[0060] The term “auto-antigen” refers to an antigen mistakenly recognized by the immune system as being foreign. Auto-antigens include cellular proteins, phosphoproteins, cellular surface proteins, cellular lipids, nucleic acids, glycoproteins, including cell surface receptors.

[0061] The term “autologous” is used to describe a material derived from a subject which is subsequently re-introduced into the same subject.

[0062] The term “allogeneic” is used to describe a graft derived from a different subject of the same species. As an example, a donor subject may be a related or unrelated or recipient subject, but the donor subject has immune system markers which are similar to the recipient subject.

[0063] The term “xenogeneic” is used to describe a graft derived from a subject of a different species. As an example, the donor subject is from a different species than a recipient subject, and the donor subject and the recipient subject can be genetically and immunologically incompatible.

[0064] The term “cancer” is used to refer to a disease characterized by the rapid and uncontrolled growth of aberrant cells. Cancer cells can spread locally or through the bloodstream and lymphatic system to other parts of the body. Examples of various cancers include breast cancer, prostate cancer, ovarian cancer, cervical cancer, skin cancer, pancreatic cancer, colorectal cancer, renal cancer, liver cancer, brain cancer, lymphoma, leukemia, lung cancer, and the like.

[0065] Throughout this specification, unless the context requires otherwise, the words “comprise,” “includes” and “including” will be understood to imply the inclusion of a stated step or element or group of steps or elements but not the exclusion of any other step or element or group of steps or elements.

[0066] The phrase “consisting of” is meant to include, and is limited to, whatever follows the phrase “consisting of.” Thus, the phrase “consisting of” indicates that the listed elements are required or mandatory and that no other elements may be present.

[0067] The phrase “consisting essentially of” is meant to include any element listed after the phrase and can include other elements that do not interfere with or contribute to the activity or action specified in the disclosure for the listed elements. Thus, the phrase “consisting essentially of” indicates that the listed elements are required or mandatory, but that other elements are optional and may or may not be present depending upon whether or not they affect the activity or action of the listed elements.

[0068] The terms “complementary” and “complementarity” refer to polynucleotides (i.e., a sequence of nucleotides) related by the base-pairing rules. For example, the sequence “A-G-T,” is complementary to the sequence “T-C-A.” Complementarity may be “partial,” in which only some of the nucleic acids' bases are matched according to the base pairing rules, or there may be “complete” or “total” complementarity between the nucleic acids. The degree of complementarity between nucleic acid strands has significant effects on the efficiency and strength of hybridization between nucleic acid strands.

[0069] The term “corresponds to” or “corresponding to” refers to (a) a polynucleotide having a nucleotide sequence that is substantially identical or complementary to all or a portion of a reference polynucleotide sequence or encoding an amino acid sequence identical to an amino acid sequence in a peptide or protein; or (b) a peptide or polypeptide having an amino acid sequence that is substantially identical to a sequence of amino acids in a reference peptide or protein.

[0070] The term “co-stimulatory ligand,” refers to a molecule on an antigen presenting cell (e.g., an APC, dendritic cell, B cell, and the like) that specifically binds a cognate co-stimulatory molecule on a T cell, thereby providing a signal which, in addition to the primary signal provided by, for instance, binding of a TCR/CD3 complex with an MHC molecule loaded with peptide, mediates a T cell response, including at least one of proliferation, activation, differentiation, and other cellular responses. A co-stimulatory ligand can include B7-1 (CD80), B7-2 (CD86), PD-L1, PD-L2, 4-1BBL, OX40L, inducible co-stimulatory ligand (ICOS-L), intercellular adhesion molecule (ICAM), CD30L, CD40, CD70, CD83, HLA-G, MICA, MICB, HVEM, lymphotoxin beta receptor, 3/TR6, ILT3, ILT4, HVEM, a ligand for CD7, an agonist or antibody that binds the Toll ligand receptor and a ligand that specifically binds with B7-H3. A co-stimulatory ligand also includes, inter alia, an agonist or an antibody that specifically binds with a co-stimulatory molecule present on a T cell, such as CD27, CD28, 4-1BB, OX40, CD30, CD40, PD-1, ICOS, lymphocyte function-associated antigen-1 (LFA-1), CD2, CD7, LIGHT, NKG2C, B7-H3, and a ligand that specifically binds CD83.

[0071] The term “co-stimulatory molecule” refers to the cognate binding partner on a T cell that specifically binds with a co-stimulatory ligand, thereby mediating a co-stimulatory response by the T cell, such as proliferation. Co-stimulatory molecules include an MHC class I molecule, BTLA, and a Toll-like receptor.

[0072] The term “co-stimulatory signal” refers to a signal, which in combination with a primary signal, such as TCR/CD3 ligation, leads to T cell proliferation and/or upregulation or downregulation of key molecules. The terms “disease” and “condition” may be used interchangeably or may be different in that the particular malady or condition may not have a known causative agent (so that etiology has not yet been worked out), and it is therefore not yet recognized as a disease but only as an undesirable condition or syndrome, wherein a more or less specific set of symptoms have been identified by clinicians. The term “disease” is a state of health of a subject wherein the subject cannot maintain homeostasis, and wherein if the disease is not ameliorated then the subject's health continues to deteriorate. In contrast, a “disorder” in a subject is a state of health in which the animal is able to maintain homeostasis, but in which the animal's state of health is less favorable than it would be in the absence of the disorder. Left untreated, a disorder does not necessarily cause a further decrease in the animal's state of health.

[0073] The term “effective” refers to adequate to accomplish a desired, expected, or intended result. For example, an “effective amount” in the context of treatment may be an amount of a compound sufficient to produce a therapeutic or prophylactic benefit.

[0074] The term “encoding” refers to the inherent property of specific sequences of nucleotides in a polynucleotide, such as a gene, a cDNA, or an mRNA, to serve as a template for synthesis of other polymers and macromolecules in biological processes having either a defined sequence of nucleotides (i.e., rRNA, tRNA and mRNA) or a defined sequence of amino acids and the biological properties resulting therefrom. Thus, a gene encodes a protein if transcription and translation of mRNA corresponding to that gene produces the protein in a cell or other biological system. Both the coding strand, the nucleotide sequence of which is identical to the mRNA sequence (except that a “T” is replaced by a “U”) and is usually provided in sequence listings, and the non-coding strand, used as the template for transcription of a gene or cDNA, can be referred to as encoding the protein or other product of that gene or cDNA.

[0075] The term “exogenous” refers to a molecule that does not naturally occur in a wild-type cell or organism but is typically introduced into the cell by molecular biological techniques. Examples of exogenous polynucleotides include vectors, plasmids, and/or man-made nucleic acid constructs encoding the desired protein. With regard to polynucleotides and proteins, the term “endogenous” or “native” refers to naturally-occurring polynucleotide or amino acid sequences that may be found in a given wild-type cell or organism. Also, a particular polynucleotide sequence that is isolated from a first organism and transferred to a second organism by molecular biological techniques is typically considered an “exogenous” polynucleotide or amino acid sequence with respect to the second organism. In specific embodiments, polynucleotide sequences can be “introduced” by molecular biological techniques into a microorganism that already contains such a polynucleotide sequence, for instance, to create one or more additional copies of an otherwise naturally-occurring polynucleotide sequence, and thereby facilitate overexpression of the encoded polypeptide.

[0076] The term “expression” refers to the transcription and/or translation of a particular nucleotide sequence driven by its promoter.

[0077] The term “expression vector” refers to a vector including a recombinant polynucleotide including expression control sequences operably linked to a nucleotide sequence to be expressed. An expression vector includes sufficient cis-acting elements for expression; other elements for expression can be supplied by the host cell or in an in vitro expression system. Expression vectors include all those known in the art, such as cosmids, plasmids (e.g., naked or contained in liposomes) and viruses (e.g., lentiviruses, retroviruses, adenoviruses, and adeno-associated viruses) that incorporate the recombinant polynucleotide.

[0078] The term “homologous” refers to sequence similarity or sequence identity between two polypeptides or between two polynucleotides when a position in both of the two compared sequences is occupied by the same base or amino acid monomer subunit, e.g., if a position in each of two DNA molecules is occupied by adenine, then the molecules are homologous at that position. The percent of homology between two sequences is a function of the number of matching or homologous positions shared by the two sequences divided by the number of positions compared ×100. For example, if 6 of 10 of the positions in two sequences are matched or homologous, then the two sequences are 60% homologous. By way of example, the DNA sequences ATTGCC and TATGGC share 50% homology. A comparison is made when two sequences are aligned to give maximum homology.

[0079] The term “immunoglobulin” or “Ig,” refers to a class of proteins, which function as antibodies. The five members included in this class of proteins are IgA, IgG, IgM, IgD, and IgE. IgA is the primary antibody that is present in body secretions, such as saliva, tears, breast milk, gastrointestinal secretions and mucus secretions of the respiratory and genitourinary tracts. IgG is the most common circulating antibody. IgM is the main immunoglobulin produced in the primary immune response in most subjects. It is the most efficient immunoglobulin in agglutination, complement fixation, and other antibody responses, and is important in defense against bacteria and viruses. IgD is the immunoglobulin that has no known antibody function but may serve as an antigen receptor. IgE is the immunoglobulin that mediates immediate hypersensitivity by causing the release of mediators from mast cells and basophils upon exposure to the allergen.

[0080] The term “isolated” refers to a material that is substantially or essentially free from components that normally accompany it in its native state. The material can be a cell or a macromolecule such as a protein or nucleic acid. For example, an “isolated polynucleotide,” as used herein, refers to a polynucleotide, which has been purified from the sequences which flank it in a naturally-occurring state, e.g., a DNA fragment which has been removed from the sequences that are normally adjacent to the fragment. Alternatively, an “isolated peptide” or an “isolated polypeptide” and the like, as used herein, refer to in vitro isolation and/or purification of a peptide or polypeptide molecule from its natural cellular environment, and from association with other components of the cell.

[0081] The term “substantially purified” refers to a material that is substantially free from components that are normally associated with it in its native state. For example, a substantially purified cell refers to a cell that has been separated from other cell types with which it is normally associated in its naturally occurring or native state. In some instances, a population of substantially purified cells refers to a homogenous population of cells. In other instances, this term refers simply to a cell that has been separated from the cells with which they are naturally associated in their natural state. In embodiments, the cells are cultured in vitro. In embodiments, the cells are not cultured in vitro.

[0082] In the context of the present disclosure, the following abbreviations for the commonly occurring nucleic acid bases are used. “A” refers to adenosine, “C” refers to cytosine, “G” refers to guanosine, “T” refers to thymidine, and “U” refers to uridine.

[0083] Unless otherwise specified, a “nucleotide sequence encoding an amino acid sequence” includes all nucleotide sequences that are degenerate versions of each other and that encode the same amino acid sequence. The phrase nucleotide sequence that encodes a protein or an RNA may also include introns to the extent that the nucleotide sequence encoding the protein may in some version contain an intron(s).

[0084] The term “lentivirus” refers to a genus of the Retroviridae family. Lentiviruses are unique among the retroviruses in being able to infect non-dividing cells; they can deliver a significant amount of genetic information into the DNA of the host cell, so they are one of the most efficient methods of a gene delivery vector. HIV, SIV, and FIV are all examples of lentiviruses. Vectors derived from lentiviruses offer the means to achieve significant levels of gene transfer in vivo.

[0085] The term “modulating,” refers to mediating a detectable increase or decrease in the level of a response in a subject compared with the level of a response in the subject in the absence of a treatment or compound, and/or compared with the level of a response in an otherwise identical but untreated subject. The term encompasses perturbing and/or affecting a native signal or response thereby mediating a beneficial therapeutic response in a subject, preferably, a human.

[0086] Nucleic acid is “operably linked” when it is placed into a functional relationship with another nucleic acid sequence. For example, DNA for a presequence or secretory leader is operably linked to DNA for a polypeptide if it is expressed as a preprotein that participates in the secretion of the polypeptide; a promoter or enhancer is operably linked to a coding sequence if it affects the transcription of the sequence; or a ribosome binding site is operably linked to a coding sequence if it is positioned so as to facilitate translation.

[0087] The term “under transcriptional control” refers to a promoter being operably linked to and in the correct location and orientation in relation to a polynucleotide to control the initiation of transcription by RNA polymerase and expression of the polynucleotide.

[0088] The term “overexpressed” tumor antigen or “overexpression” of the tumor antigen is intended to indicate an abnormal level of expression of the tumor antigen in a cell from a disease area such as a solid tumor within a specific tissue or organ of the patient relative to the level of expression in a normal cell from that tissue or organ. Patients having solid tumors or a hematological malignancy characterized by overexpression of the tumor antigen can be determined by standard assays known in the art.

[0089] Solid tumors are abnormal masses of tissue that usually do not contain cysts or liquid areas. Solid tumors can be benign or malignant. Different types of solid tumors are named for the type of cells that form them (such as sarcomas, carcinomas, and lymphomas). Examples of solid tumors, such as sarcomas and carcinomas, include fibrosarcoma, myxosarcoma, liposarcoma, chondrosarcoma, osteosarcoma, and other sarcomas, synovioma, mesothelioma, Ewing's tumor, leiomyosarcoma, rhabdomyosarcoma, colon carcinoma, lymphoid malignancy, pancreatic cancer, breast cancer, lung cancers, ovarian cancer, prostate cancer, hepatocellular carcinoma, squamous cell carcinoma, basal cell carcinoma, adenocarcinoma, sweat gland carcinoma, medullary thyroid carcinoma, papillary thyroid carcinoma, pheochromocytomas sebaceous gland carcinoma, papillary carcinoma, papillary adenocarcinomas, medullary carcinoma, bronchogenic carcinoma, renal cell carcinoma, hepatoma, bile duct carcinoma, choriocarcinoma, Wilms' tumor, cervical cancer, testicular tumor, seminoma, bladder carcinoma, melanoma, and CNS tumors (such as a glioma (such as brainstem glioma and mixed gliomas), glioblastoma (also known as glioblastoma multiforme), astrocytoma, CNS lymphoma, germinoma, medulloblastoma, Schwannoma craniopharyogioma, ependymoma, pinealoma, hemangioblastoma, acoustic neuroma, oligodendroglioma, menangioma, neuroblastoma, retinoblastoma, and brain metastases).

[0090] A solid tumor antigen is an antigen expressed on a solid tumor. In embodiments, solid tumor antigen is also expressed at low levels on healthy tissue. Examples of solid tumor antigens and their related disease tumors are provided in Table 1.

TABLE 1

| Solid Tumor antigen | Disease tumor |
|---|---|
| PRLR | Breast Cancer |
| CLCA1 | colorectal Cancer |
| MUC12 | colorectal Cancer |
| GUCY2C | colorectal Cancer |
| GPR35 | colorectal Cancer |
| CR1L | Gastric Cancer |
| MUC 17 | Gastric Cancer |
| TMPRSS11B | esophageal Cancer |
| MUC21 | esophageal Cancer |
| TMPRSS11E | esophageal Cancer |
| CD207 | bladder Cancer |
| SLC30A8 | pancreatic Cancer |
| CFC1 | pancreatic Cancer |
| SLC12A3 | Cervical Cancer |
| SSTR1 | Cervical tumor |
| GPR27 | Ovary tumor |
| FZD10 | Ovary tumor |
| TSHR | Thyroid Tumor |
| SIGLEC15 | Urothelial cancer |
| SLC6A3 | Renal cancer |
| KISS1R | Renal cancer |
| QRFPR | Renal cancer |
| GPR119 | Pancreatic cancer |
| CLDN6 | Endometrial cancer/Urothelial cancer |
| UPK2 | Urothelial cancer (including bladder cancer) |
| ADAM12 | Breast cancer, pancreatic cancer and the like |
| SLC45A3 | Prostate cancer |
| ACPP | Prostate cancer |
| MUC21 | Esophageal cancer |
| MUC16 | Ovarian cancer |
| MS4A12 | Colorectal cancer |
| ALPP | Endometrial cancer |
| CEA | Colorectal carcinoma |
| EphA2 | Glioma |
| FAP | Mesotelioma |
| GPC3 | Lung squamous cell carcinoma |
| IL13-Rα2 | Glioma |
| Mesothelin | Metastatic cancer |
| PSMA | Prostate cancer |
| ROR1 | Breast lung carcinoma |
| VEGFR-II | Metastatic cancer |
| GD2 | Neuroblastoma |
| FR-α | Ovarian carcinoma |
| ErbB2 | Carcinomasb |
| EpCAM | Carcinomasa |
| EGFRvIII | Glioma-Glioblastoma |
| EGFR | Glioma-NSCL cancer |
| tMUC 1 | Cholangiocarcinoma, Pancreatic cancer, |
| | Breast Cancer |
| PSCA | pancreas, stomach, or prostate cancer |

[0091] The term “parenteral administration” of a composition includes, e.g., subcutaneous (s.c.), intravenous (i.v.), intramuscular (i.m.), intrasternal injection, or infusion techniques.

[0092] The terms “patient,” “subject,” and “individual,” and the like are used interchangeably herein and refer to any human, animal, or living organism, amenable to the methods described herein. In certain non-limiting embodiments, the patient, subject, or individual is a human or animal. In embodiments, the term “subject” is intended to include living organisms in which an immune response can be elicited (e.g., mammals). Examples of subjects include humans, and animals such as dogs, cats, mice, rats, and transgenic species thereof.

[0093] A subject in need of treatment or in need thereof includes a subject having a disease, condition, or disorder that needs to be treated. A subject in need thereof also includes a subject that needs treatment for prevention of a disease, condition, or disorder.

[0094] The term “polynucleotide” or “nucleic acid” refers to mRNA, RNA, cRNA, rRNA, cDNA or DNA. The term typically refers to a polymeric form of nucleotides of at least 10 bases in length, either ribonucleotides or deoxynucleotides or a modified form of either type of nucleotide. The term includes all forms of nucleic acids including single and double-stranded forms of nucleic acids.

[0095] The terms “polynucleotide variant” and “variant” and the like refer to polynucleotides displaying substantial sequence identity with a reference polynucleotide sequence or polynucleotides that hybridize with a reference sequence under stringent conditions that are defined hereinafter. These terms also encompass polynucleotides that are distinguished from a reference polynucleotide by the addition, deletion or substitution of at least one nucleotide. Accordingly, the terms “polynucleotide variant” and “variant” include polynucleotides in which one or more nucleotides have been added or deleted or replaced with different nucleotides. In this regard, it is well understood in the art that certain alterations inclusive of mutations, additions, deletions, and substitutions can be made to a reference polynucleotide whereby the altered polynucleotide retains the biological function or activity of the reference polynucleotide or has increased activity in relation to the reference polynucleotide (i.e., optimized). Polynucleotide variants include, for example, polynucleotides having at least 50% (and at least 51% to at least 99% and all integer percentages in between, e.g., 90%, 95%, or 98%) sequence identity with a reference polynucleotide sequence described herein. The terms “polynucleotide variant” and “variant” also include naturally-occurring allelic variants and orthologs.

[0096] The terms “polypeptide,” “polypeptide fragment,” “peptide,” and “protein” are used interchangeably herein to refer to a polymer of amino acid residues and to variants and synthetic analogues of the same. Thus, these terms apply to amino acid polymers in which one or more amino acid residues are synthetic non-naturally occurring amino acids, such as a chemical analogue of a corresponding naturally occurring amino acid, as well as to naturally-occurring amino acid polymers. In certain aspects, polypeptides may include enzymatic polypeptides, or “enzymes,” which typically catalyze (i.e., increase the rate of) various chemical reactions.

[0097] The term “polypeptide variant” refers to polypeptides that are distinguished from a reference polypeptide sequence by the addition, deletion, or substitution of at least one amino acid residue. In certain embodiments, a polypeptide variant is distinguished from a reference polypeptide by one or more substitutions, which may be conservative or non-conservative. In certain embodiments, the polypeptide variant comprises conservative substitutions and, in this regard, it is well understood in the art that some amino acids may be changed to others with broadly similar properties without changing the nature of the activity of the polypeptide. Polypeptide variants also encompass polypeptides in which one or more amino acids have been added or deleted or replaced with different amino acid residues.

[0098] The term “promoter” refers to a DNA sequence recognized by the synthetic machinery of the cell or introduced synthetic machinery, required to initiate the specific transcription of a polynucleotide sequence. The term “expression control sequences” refers to DNA sequences necessary for the expression of an operably linked coding sequence in a particular host organism. The control sequences that are suitable for prokaryotes, for example, include a promoter, optionally an operator sequence, and a ribosome binding site. Eukaryotic cells are known to utilize promoters, polyadenylation signals, and enhancers.

[0099] The term “bind,” “binds,” or “interacts with” refers to a molecule recognizing and adhering to a second molecule in a sample or organism but does not substantially recognize or adhere to other structurally unrelated molecules in the sample. The term “specifically binds,” as used herein with respect to an antibody, refers to an antibody which recognizes a specific antigen, but does not substantially recognize or bind other molecules in a sample. For example, an antibody that specifically binds an antigen from one species may also bind that antigen from one or more species. But, such cross-species reactivity does not itself alter the classification of an antibody as specific. In another example, an antibody that specifically binds an antigen may also bind different allelic forms of the antigen. However, such cross reactivity does not itself alter the classification of an antibody as specific. In some instances, the terms “specific binding” or “specifically binding,” can be used in reference to the interaction of an antibody, a protein, or a peptide with a second chemical species, to mean that the interaction is dependent upon the presence of a particular structure (e.g., an antigenic determinant or epitope) on the chemical species; for example, an antibody recognizes and binds a specific protein structure rather than to any protein. If an antibody is specific for epitope “A,” the presence of a molecule containing epitope A (or free, unlabeled A), in a reaction containing labeled “A” and the antibody, will reduce the amount of labeled A bound to the antibody.

[0100] By “statistically significant,” it is meant that the result was unlikely to have occurred by chance. Statistical significance can be determined by any method known in the art. Commonly used measures of significance include the p-value, which is the frequency or probability with which the observed event would occur if the null hypothesis were true. If the obtained p-value is smaller than the significance level, then the null hypothesis is rejected. In simple cases, the significance level is defined at a p-value of 0.05 or less. A “decreased” or “reduced” or “lesser” amount is typically a “statistically significant” or a physiologically significant amount, and may include a decrease that is about 1.1, 1.2, 1.3, 1.4, 1.5, 1.6 1.7, 1.8, 1.9, 2, 2.5, 3, 3.5, 4, 4.5, 5, 6, 7, 8, 9, 10, 15, 20, 30, 40, or 50 or more times (e.g., 100, 500, 1000 times) (including all integers and decimal points in between and above 1, e.g., 1.5, 1.6, 1.7. 1.8, etc.) an amount or level described herein.

[0101] The term “stimulation,” refers to a primary response induced by binding of a stimulatory molecule (e.g., a TCR/CD3 complex) with its cognate ligand thereby mediating a signal transduction event, such as signal transduction via the TCR/CD3 complex. Stimulation can mediate altered expression of certain molecules, such as downregulation of TGF-β, and/or reorganization of cytoskeletal structures.

[0102] The term “stimulatory molecule” refers to a molecule on a T cell that specifically binds a cognate stimulatory ligand present on an antigen presenting cell. For example, a functional signaling domain derived from a stimulatory molecule is the zeta chain associated with the T cell receptor complex.

[0103] The term “stimulatory ligand” refers to a ligand that when present on an antigen presenting cell (e.g., an APC, a dendritic cell, a B-cell, and the like.) can specifically bind with a cognate binding partner (referred to herein as a “stimulatory molecule”) on a cell, for example a T cell, thereby mediating a primary response by the T cell, including activation, initiation of an immune response, proliferation, and similar processes. Stimulatory ligands are well-known in the art and encompass, inter alia, an MHC Class I molecule loaded with a peptide, an anti-CD3 antibody, a superagonist anti-CD28 antibody, and a superagonist anti-CD2 antibody.

[0104] The term “therapeutic” refers to a treatment and/or prophylaxis. A therapeutic effect is obtained by suppression, remission, or eradication of a disease state or alleviating the symptoms of a disease state.

[0105] The term “therapeutically effective amount” refers to the amount of the subject compound that will elicit the biological or medical response of a tissue, system, or subject that is being sought by the researcher, veterinarian, medical doctor or another clinician. The term “therapeutically effective amount” includes that amount of a compound that, when administered, is sufficient to prevent the development of, or alleviate to some extent, one or more of the signs or symptoms of the disorder or disease being treated. The therapeutically effective amount will vary depending on the compound, the disease and its severity and the age, weight, etc., of the subject to be treated.

[0106] The term “treat a disease” refers to the reduction of the frequency or severity of at least one sign or symptom of a disease or disorder experienced by a subject.

[0107] The term “transfected” or “transformed” or “transduced” refers to a process by which an exogenous nucleic acid is transferred or introduced into the host cell. A “transfected” or “transformed” or “transduced” cell is one which has been transfected, transformed, or transduced with exogenous nucleic acid. The cell includes the primary subject cell and its progeny.

[0108] The term “vector” refers to a polynucleotide that comprises an isolated nucleic acid and which can be used to deliver the isolated nucleic acid to the interior of a cell. Numerous vectors are known in the art including linear polynucleotides, polynucleotides associated with ionic or amphiphilic compounds, plasmids, and viruses. Thus, the term “vector” includes an autonomously replicating plasmid or a virus. The term also includes non-plasmid and non-viral compounds which facilitate the transfer of nucleic acid into cells, such as, for example, polylysine compounds, liposomes, and the like. Examples of viral vectors include adenoviral vectors, adeno-associated virus vectors, retroviral vectors, and others. For example, lentiviruses are complex retroviruses, which, in addition to the common retroviral genes gag, pol, and env, contain other genes with regulatory or structural function. Lentiviral vectors are well known in the art. Some examples of lentivirus include the Human Immunodeficiency Viruses: HIV-1, HIV-2, and the Simian Immunodeficiency Virus: SIV. Lentiviral vectors have been generated by multiply attenuating the HIV virulence genes, for example, the genes env, vif, vpr, vpu, and nef are deleted making the vector biologically safe.

[0109] Ranges: throughout this disclosure, various aspects of the disclosure can be presented in a range format. It should be understood that the description in range format is merely for convenience and brevity and should not be construed as an inflexible limitation on the scope of the disclosure. Accordingly, the description of a range should be considered to have specifically disclosed all the possible subranges as well as individual numerical values within that range. For example, description of a range such as from 1 to 6 should be considered to have specifically disclosed subranges such as from 1 to 3, from 1 to 4, from 1 to 5, from 2 to 4, from 2 to 6, from 3 to 6 etc., as well as individual numbers within that range, for example, 1, 2, 2.7, 3, 4, 5, 5.3, and 6. This applies regardless of the breadth of the range.

[0110] A “chimeric antigen receptor” (CAR) molecule is a recombinant polypeptide including at least an extracellular domain, a transmembrane domain and a cytoplasmic domain or intracellular domain. In embodiments, the domains of the CAR are on the same polypeptide chain, for example a chimeric fusion protein. In embodiments, the domains are on different polypeptide chains, for example the domains are not contiguous.

[0111] The extracellular domain of a CAR molecule includes an antigen binding domain. In embodiments, the antigen binding domain binds an antigen, for example, a cell surface molecule or marker, on the surface of a B cell. In embodiments, the cell surface molecule of a B cell includes CD19, CD22, CD20, BCMA, CD5, CD7, CD2, CD16, CD56, CD30, CD14, CD68, CD11b, CD18, CD169, CD1c, CD33, CD38, CD138, or CD13. In embodiments, the cell surface molecule of the B cell is CD19, CD20, CD22, or BCMA. In particular embodiments, the cell surface molecule of the B cell is CD19.

[0112] In embodiments, the antigen binding domain binds an antigen, on the surface of a tumor for example a tumor antigen or tumor marker. Tumor antigens are proteins that are produced by tumor cells that elicit an immune response, particularly T cell mediated immune responses. Tumor antigens are well known in the art and include, for example, tumor associated MUC1, a glioma-associated antigen, carcinoembryonic antigen (CEA), β-human chorionic gonadotropin, alphafetoprotein (AFP), lectin-reactive AFP, thyroglobulin, RAGE-1, MN-CA IX, human telomerase reverse transcriptase, RU1, RU2 (AS), intestinal carboxyl esterase, mut hsp70-2, M-CSF, prostase, prostate-specific antigen (PSA), PAP, NY-ESO-1, LAGE-1a, p53, prostein, PSMA, Her2/neu, surviving, telomerase, prostate-carcinoma tumor antigen-1 (PCTA-1), MAGE, ELF2M, neutrophil elastase, ephrinB2, CD22, insulin growth factor (IGF)-I, IGF-II, IGF-I receptor and mesothelin. For example, when the tumor antigen is CD19, the CAR thereof can be referred to as CD19CAR.

[0113] In embodiments, the extracellular antigen binding domain of a CAR includes at least one scFv or at least a single domain antibody. As an example, there can be two scFvs on a CAR. The scFv includes a light chain variable (VL) region and a heavy chain variable (VH) region of a target antigen-specific monoclonal antibody joined by a flexible linker. Single chain variable region fragments can be made by linking light and/or heavy chain variable regions by using a short linking peptide (Bird et al., Science 242:423-426, 1988). An example of a linking peptide is the GS linker having the amino acid sequence (GGGGS)3 (SEQ ID NO: 278), which bridges approximately 3.5 nm between the carboxy terminus of one variable region and the amino terminus of the other variable region. Linkers of other sequences have been designed and used (Bird et al., 1988, supra). In general, linkers can be short, flexible polypeptides and preferably comprised of about 20 or fewer amino acid residues. The single chain variants can be produced either recombinantly or synthetically. For synthetic production of scFv, an automated synthesizer can be used. For recombinant production of scFv, a suitable plasmid containing polynucleotide that encodes the scFv can be introduced into a suitable host cell, either eukaryotic, such as yeast, plant, insect or mammalian cells, or prokaryotic, such as E. coli. Polynucleotides encoding the scFv of interest can be made by routine manipulations such as ligation of polynucleotides. The resultant scFv can be isolated using standard protein purification techniques known in the art.

[0114] The cytoplasmic domain of the CAR molecules described herein includes one or more co-stimulatory domains and one or more signaling domains. The co-stimulatory and signaling domains function to transmit the signal and activate molecules, such as T cells, in response to antigen binding. The one or more co-stimulatory domains are derived from stimulatory molecules and/or co-stimulatory molecules, and the signaling domain is derived from a primary signaling domain, such as the CD3 zeta domain. In embodiments, the signaling domain further includes one or more functional signaling domains derived from a co-stimulatory molecule. In embodiments, the co-stimulatory molecules are cell surface molecules (other than antigens receptors or their ligands) that are required for activating a cellular response to an antigen.

[0115] In embodiments, the co-stimulatory domain includes the intracellular domain of CD27, CD28, 4-1BB, OX40, CD30, CD40, PD-1, ICOS, lymphocyte function-associated antigen-1 (LFA-1), CD2, CD7, LIGHT, NKG2C, B7-H3, a ligand that specifically binds with CD83, or any combination thereof. In embodiments, the signaling domain includes a CD3 zeta domain derived from a T cell receptor.

[0116] In embodiments, the cytoplasmic domain of the CAR only includes one or more stimulatory domains and no signaling domain.

[0117] The CAR molecules also include a transmembrane domain. The incorporation of a transmembrane domain in the CAR molecules stabilizes the molecule. In embodiments, the transmembrane domain of the CAR molecules is the transmembrane domain of a CD28 or 4-1BB molecule.

[0118] Between the extracellular domain and the transmembrane domain of the CAR, there may be incorporated a spacer domain. As used herein, the term “spacer domain” generally means any oligo- or polypeptide that functions to link the transmembrane domain to, either the extracellular domain or, the cytoplasmic domain on the polypeptide chain. A spacer domain may include up to 300 amino acids, preferably 10 to 100 amino acids, and most preferably 25 to 50 amino acids.

[0119] The present disclosure describes isolated nucleic acids encoding at least two different antigen binding domains. In embodiments, there is a first antigen binding domain that binds an antigen on the surface of a WBC, and there is a second antigen binding domain that binds an antigen on a tumor that is different from the antigen on the surface of a WBC. The first antigen binding domain functions to expand the cells that it is introduced into, while the second antigen binding domain functions to inhibit the growth of or kill tumor cells containing the target tumor antigen upon binding to the target antigen. In embodiments, an isolated nucleic acid described herein encodes both the first and second antigen binding domains on the same nucleic acid molecule. In embodiments, the two antigen binding domains are encoded by two separate nucleic acid molecules. For example, a first nucleic acid encodes a first antigen binding domain and a second nucleic acid encodes a second antigen binding domain.

[0120] In embodiments, the present disclosure describes nucleic acids encoding a first antigen binding domain of a binding molecule and a second antigen binding domain of a binding molecule, wherein first antigen binding domain binds a cell surface molecule of a WBC, and the second antigen binding domain binds an antigen different from the cell surface molecule of the WBC. In embodiments, the second binding domain does not bind a B cell marker. In embodiments, the second binding domain includes a scFv comprising an amino acid sequence of SEQ ID No: 264 or 265. For example, the second antigen binding domain is on a CAR having one of the amino acid sequences of SEQ ID Nos: 271-277.

[0121] In embodiments, the first and second antigen binding domains can be on two different binding molecules (first and second binding molecules) such as a first CAR and a second CAR. As an example, a first CAR includes an extracellular binding domain that binds a marker on the surface of a B cell, and a second CAR includes an extracellular binding domain that binds a target antigen of a tumor cell. In embodiments, the first CAR and second CAR are encoded by different nucleic acids. In embodiments, the first CAR and second CAR are two different binding molecules but are encoded by a single nucleic acid.

[0122] In embodiments, the two different antigen binding domains can be on the same binding molecule, for example on a bispecific CAR, and encoded by a single nucleic acid. In embodiments, the bispecific CAR can have two different scFv molecules joined together by linkers.

[0123] In embodiments, the two different antigen binding domains can be on a CAR and a T cell receptor (TCR) and are encoded by separate nucleic acids. The binding domain of a TCR can target a specific tumor antigen or tumor marker on the cell of a tumor. In embodiments the TCR binding domain is a TCR alpha binding domain or TCR beta binding domain that targets a specific tumor antigen. In embodiments, the TCR comprises the TCRγ and TCRδ chains or the TCRα and TCRβ chains.

[0124] The present disclosure also describes vectors including the isolated nucleic acids described above. In embodiments, a single vector contains the isolated nucleic acid encoding the first CAR and second CAR or TCR. In embodiments, a first vector contains the first nucleic acid encoding a first CAR, a second vector contains the nucleic acid encoding the second CAR or TCR. In embodiments, the vector comprises a bispecific CAR including at least two antigen binding domains.

[0125] Moreover, the present disclosure describes cells comprising the isolated nucleic acids or vectors described above. The cells have been introduced with the isolated nucleic acids or vectors described herein and express at least two more different binding domains. In embodiments, the cells include a first antigen binding domain and a second antigen binding domain, wherein the first antigen binding domain binds a cell surface molecule of a WBC, and the second antigen binding domain binds an antigen different from the cell surface molecule of a WBC. Further, the present disclosure describes compositions including a population of the cells described herein. In embodiments, the cells are lymphocytes. In particular embodiments, the lymphocytes are T cells, NK cell, or dendritic cells.

[0126] The present disclosure also describes methods of culturing cells described above. The methods described herein includes obtaining a cell comprising a first antigen binding domain and a second antigen binding domain, wherein the first antigen binding domain binds a cell surface molecule of a WBC, and the second antigen binding domain binds an antigen different from the cell surface molecule of the WBC; and culturing the cell in the presence of an agent derived from a cell surface molecule of the WBC or from an antigen to which the second antigen binding domain binds. In embodiments, the agent is an extracellular domain of a cell surface molecule of a WBC.

[0127] The present disclose describes methods for in vitro cell preparation, wherein the method includes providing cells; introducing one or more nucleic acids encoding a first antigen binding domain and a second antigen binding domain into the cells, wherein the first antigen binding domain binds a cell surface molecule of a WBC, and the second antigen binding domain binds an antigen different from the cell surface molecule of the WBC; and culturing the cells in the presence of an agent derived from the cell surface molecule of the WBC or from an antigen to which the second antigen binding domain binds.

[0128] The present disclosure describes using the prepared cells preparation to enhance T cell expansion in a subject having cancer. In embodiments, the method comprises introducing a plurality of nucleic acids into T cells, the plurality of nucleic acids encoding a chimeric antigen receptor (CAR) binding a solid tumor antigen and encoding a CAR binding a B cell antigen, at least a portion of the T cells comprising the CAR binding the solid tumor antigen and the CAR binding the B cell antigen; and administering an effective amount of the T cells to the subject.

[0129] Additionally, the present disclosure describes methods for introducing and/or enhancing lymphocyte (T cell) response in a subject. Embodiments described herein involve a mechanism that expands lymphocytes and a mechanism that relates to binding of an antigen on a CAR to a tumor cell. In embodiments, the first mechanism involves a molecule associated with a signal that is involved in expanding the lymphocytes in a subject, and an additional mechanism involves a molecule associated with a signal directed to binding, inhibiting the growth of, or killing a tumor cell in the subject. For example, the first mechanism includes a CAR binding to an antigen associated with blood, such as blood cells and blood plasma, or non-essential tissues, and the additional mechanism includes a CAR or TCR targeting an antigen associated with the tumor cell. Examples of non-essential tissues include the mammary gland, colon, gastric gland, ovary, blood components, such WBC, and thyroid. In embodiments, the first mechanism involves a first binding domain of a molecule, and the additional mechanism involves a second domain of a molecule. In embodiments, the first mechanism and the additional mechanism are performed by the same molecule or by separate molecules. In particular embodiments, the mechanism involves a cell expressing an antigen associated with a tumor cell, and the additional mechanism involves a lymphocyte having an antigen binding domain.

[0130] The methods described herein involves lymphocytes including an expansion molecule and a function molecule. In embodiments, the expansion molecule expands the lymphocytes in a subject, and/or the function molecule inhibits the growth of or kills a tumor cell in the subject. In embodiments, the expansion molecule and the function molecule are on a single CAR molecule, for example a bispecific CAR molecule. In embodiments, the expansion molecule and the function molecule are on separate molecules, for example, CAR and TCR or two different CARs. The expansion molecule can include a CAR binding to an antigen associated with blood (e.g., blood cells and blood plasma) or non-essential tissues, and the function molecule can include a CAR or TCR targeting an antigen associated with the tumor cell.

[0131] Lymphocyte or T cell response in a subject refers to cell-mediated immunity associated with a helper, killer, regulatory, and other types of T cells. For example, T cell response may include activities such as assisting other WBCs in immunologic processes and identifying and destroying virus-infected cells and tumor cells. T cell response in the subject can be measured via various indicators such as a number of virus-infected cells and/or tumor cells that T cells kill, the amount of cytokines (e.g., IL-6 and IFN-γ) that T cells release in vivo and/or in co-culturing with virus-infected cells and/or tumor cells, indicates a level of proliferation of T cells in the subject, a phenotype change of T cells, for example, changes to memory T cells, and a level longevity or lifetime of T cells in the subject.

[0132] In embodiments, the method of enhancing T cell response treats a subject in need thereof, for example, a subject diagnosed with a tumor. The term tumor refers to a mass, which can be a collection of fluid, such as blood, or a solid mass. A tumor can be malignant (cancerous) or benign. Examples of blood cancers include chronic lymphocytic leukemia, acute myeloid leukemia, acute lymphoblastic leukemia, and multiple myeloma.

[0133] Solid tumors usually do not contain cysts or liquid areas. The major types of malignant solid tumors include sarcomas and carcinomas. Sarcomas are tumors that develop in soft tissue cells called mesenchymal cells, which can be found in blood vessels, bone, fat tissues, ligament lymph vessels, nerves, cartilage, muscle, ligaments, or tendon, while carcinomas are tumors that form in epithelial cells, which are found in the skin and mucous membranes. The most common types of sarcomas include undifferentiated pleomorphic sarcoma which involves soft tissue and bone cells; leiomyosarcoma which involves smooth muscle cells that line blood vessels, gastrointestinal tract, and uterus; osteosarcoma which involves bone cells, and liposarcoma which involves fat cells. Some examples of sarcomas include Ewing sarcoma, Rhabdomyosarcoma, chondosarcoma, mesothelioma, fibrosarcoma, fibrosarcoma, and glioma.

[0134] The five most common carcinomas include adrenocarcinoma which involves organs that produce fluids or mucous, such as the breasts and prostate; basal cell carcinoma which involves cells of the outer-most layer of the skin, for example, skin cancer; squamous cell carcinoma which involves the basal cells of the skin; and transitional cell carcinoma which affects transitional cells in the urinary tract which includes the bladder, kidneys, and ureter. Examples of carcinomas include cancers of the thyroid, breast, prostate, lung, intestine, skin, pancreas, liver, kidneys, and bladder, and cholangiocarcinoma.

[0135] The methods described herein can be used to treat a subject diagnosed with cancer. The cancer can be a blood cancer or can be a solid tumor, such as a sarcoma or carcinoma. The method of treating includes administering an effective amount of T cells comprising a first antigen binding domain and a second antigen binding domain to the subject to provide a T-cell response, wherein the first antigen binding domain binds a cell surface molecule of a WBC, and the second antigen binding domain binds an antigen different from the cell surface molecule of the WBC. In embodiments, enhancing the T cell response in the subject includes selectively enhancing proliferation of T cell expressing the first antigen binding domain and the second antigen binding domain in vivo.

[0136] In embodiments, the T cells for enhancing T cell response in a subject includes administering to the subject, T cells comprising a bispecific CAR including two different binding domains or administering T cells comprising a first CAR and a second CAR, wherein the first CAR and the second CAR, each includes a different antigen binding domain.

[0137] In embodiments, methods for enhancing T cell response in a subject includes administering a T cell including a CAR molecule and a TCR molecule. The CAR molecule targets or binds a surface marker of a white blood cell, and the TCR molecule binds a marker or an antigen of the tumor that is expressed on the surface or inside the tumor cell.

[0138] The present disclosure describes methods of expanding cells expressing an antigen binding domain in vivo. The method includes administering an effective amount of T cells comprising a first antigen binding domain and a second antigen binding domain to a subject in need thereof, wherein the first antigen binding domain binds a cell surface molecule of a WBC, and the second antigen binding domain binds an antigen different from the cell surface molecule of the WBC. The methods are useful for expanding T cells, NK cells, or dendritic cells.

[0139] In embodiments, the first antigen binding domain is on a first chimeric antigen receptor (CAR) and the second antigen binding domain is on a second CAR or a TCR. For example, the first CAR and the second CAR or TCR include an extracellular antigen binding domain, a transmembrane domain, and a cytoplasmic domain. The cytoplasmic domain of the first CAR include a co-stimulatory domain and a CD3 zeta domain for transmitting signals for activation of cellular responses. In embodiments, the cytoplasmic domain of the first CAR includes one or more co-stimulatory domains in the absence of a CD3 zeta domain such that activation or stimulation of the first CAR expands WBCs, such as lymphocytes, without introducing and/or activating the killing function of the WBCs. In embodiments, the lymphocytes are T cells.

[0140] In embodiments, the first and second antigen binding domains are on the same CAR (the first CAR), for example, a bispecific CAR with an extracellular antigen binding domain, a transmembrane domain, and a cytoplasmic domain. The extracellular antigen binding domain includes at least two scFvs and at least one of the scFvs function as a first antigen binding domain for binding a cell surface molecule of a WBC.

[0141] In embodiments, the antigen different from the cell surface molecule of the WBC is CD19, CD22, CD20, BCMA, CD5, CD7, CD2, CD16, CD56, CD30, CD14, CD68, CD11b, CD18, CD169, CD1c, CD33, CD38, CD138, CD13, B7, CAIX, CD123, CD133, CD171, CD171/L1-CAM, CEA, Claudin 18.2, cMet, CS1, CSPG4, Dectin1, EGFR, EGFR vIII, EphA2, ERBB receptors, ErbB T4, ERBB2, FAP, Folate receptor 1, FITC, Folate receptor 1, FSH, GD2, GPC3, HA-1 H/HLA-A2, HER2, IL-11Ra, IL13 receptor a2, IL13R, IL13Rα2 (zetakine), Kappa, Leukemia, LewisY, Mesothelin, MUC1, NKG2D, NY-ESO-1, PSMA, ROR-1, TRAIL-receptor1, or VEGFR2.

[0142] In embodiments, the MUC1 is a tumor-exclusive epitope of a human MUC1, and the first CAR and the second CAR or the TCR are expressed as separate polypeptides. In embodiments, the MUC1 is a tumor form of human MUC1 (tMUC1).

[0143] In embodiments, the first CAR includes a co-stimulatory domain without a signaling domain, such as the CD3 zeta domain, and the MUC1 CAR (second CAR) comprises the MUC1 binding domain, a transmembrane domain, a co-stimulatory, and a CD3 zeta domain.

[0144] As used herein, the term “MUC1” refers to a molecule defined as follows. MUC1 is one of the epithelial mucin family of molecules. MUC1 is a transmembrane mucin glycoprotein that is normally expressed on all glandular epithelial cells of the major organs. In normal cells, MUC1 is only expressed on the apical surface and is heavily glycosylated with its core proteins sequestered by the carbohydrates. As cells transform to a malignant phenotype, expression of MUC1 increases several folds, and the expression is no longer restricted to the apical surface, but it is found all around the cell surface and in the cytoplasm. In addition, the glycosylation of tumor associated MUC1 is aberrant, with greater exposure of the peptide core than is found on MUC1 expressed in normal tissues. Little is known regarding the specifics of the aberrant glycosylation.

[0145] MUC1 is widely expressed on a large number of epithelial cancers and is aberrantly glycosylated making it structurally and antigenically distinct from that expressed by non-malignant cells (see, e.g., Barratt-Boyes, 1996; Price et al., 1998; Peterson et al., 1991). The dominant form of MUC1 is a high molecular weight molecule comprising a large highly immunogenic extracellular mucin-like domain with a large number of twenty amino acid tandem repeats, a transmembrane region, and a cytoplasmic tail (Quin et al., 2000; McGucken et al., 1995; Dong et al., 1997).

[0146] In most epithelial adenocarcinomas including breast and pancreas, MUC1 is overexpressed and aberrantly glycosylated. Adenocarcinoma of the breast and pancreas not only overexpress MUC1 but also shed MUC1 into the circulation. High MUC1 serum levels are associated with progressive disease. MUC1 has been exploited as a prospective biomarker because of the complex and heterogeneous nature of the epitopes expressed within the antigen. MUC1 synthesized by cancerous tissues (e.g., tumor associated MUC1) usually displays an aberrant oligosaccharide profile, which gives rise to the expression of neomarkers such as sialyl-Lea (assayed in the CA19-9 test), sialyl-Lex, and sialyl-Tn (TAG-72), as well as the cryptic epitopes such as Tn.

[0147] Several antibodies are being developed against MUC1 for therapeutic use. Pemtumomab (also known as HMFG1) is in Phase III clinical trials as a carrier to deliver the radioisotope Yttrium-90 into tumors in ovarian cancer (reviewed in Scott et al., 2012). CA15-3 (also the HMFG1 antibody), CA27-29, and CA19-9 are all antibodies to MUC1 that are used to assess levels of circulating MUC1 in patients with cancer. However, these antibodies have shown limited utility as therapeutic agents or as biomarkers because they cannot distinguish effectively between MUC1 expressed on normal versus transformed tumor epithelia. In other words, none of these antibodies appear to be targeted to a tumor-specific MUC1 epitope.

[0148] A new antibody that is highly specific for a tumor-specific form of MUC1 (tMUC) is designated TAB-004 and is described in U.S. Pat. No. 8,518,405 (see also Curry et al., 2013). While Pemtumomab (HMFG1) was developed using human milk fat globules as the antigen (Parham et al., 1988), TAB-004 was developed using tumors expressing an altered form of MUC1 (Tinder et al., 2008). TAB-004 recognizes the altered glycosylated epitope within the MUC1 tandem repeat sequence. This area is accessible for antigenic detection in tMUC but is blocked from antigenic detection in normal MUC1 by large branches of glycosylation (Gendler, 2001; Mukherjee et al., 2003b; Hollingsworth & Swanson, 2004; Kufe, 2009). Importantly, TAB-004 is different from the epitopes recognized by other MUC1 antibody and has unique complementary determinant regions (CDRs) of the heavy and light chains. The antibody binds the target antigen with a high binding affinity at 3 ng/ml (20 pM) and does not bind unrelated antigens (Curry et al., 2013). Thus, TAB-004 distinguishes between normal and tumor form of MUC1 while HMFG1 (Pemtumomab) does not (see U.S. Pat. No. 8,518,405).

[0149] In embodiments, the WBC is a granulocyte, monocyte and or lymphocyte. In embodiments, the WBC is a B cell.

[0150] In embodiments, the first CAR comprises the first antigen binding domain, a transmembrane domain, a co-stimulatory domain, and a CD3 zeta domain and/or the second CAR comprises the second antigen binding domain, a transmembrane domain, a co-stimulatory domain, and a CD3 zeta domain.

[0151] In embodiments, the antigen binding domain is a Fab or a scFv. In embodiments, the first CAR comprises the amino acid sequence of one of SEQ ID NO: 5, 6, and 53-58; and the second CAR comprises the amino acid sequence of one of SEQ ID NOs: 5-17, 29, 33, 37, 71, and 72, or the amino acid sequence encoded by the nucleic acid sequence of one of SEQ ID Nos: 41, 45, 63, 67, and 68. In embodiments, a nucleic acid sequence encoding the first CAR comprises the nucleic acid sequence of SEQ ID NO: 59 or 60, and a nucleic acid sequence encoding the second CAR comprises the nucleic acid sequence of SEQ ID NO: 61. In embodiments, the isolated nucleic acid comprises one of the nucleic acid sequence of SEQ ID NO: 62-69. In embodiments, the first CAR and the second CAR are expressed as separate polypeptides.

[0152] In embodiments, the first antigen binding domain is on a CAR and the second antigen binding domain is on a T Cell Receptor (TCR). In embodiments, the TCR is a modified TCR. In embodiments, the TCR is derived from spontaneously occurring tumor-specific T cells in patients. In embodiments, the TCR binds a tumor antigen. In embodiments, the tumor antigen comprises CEA, gp100, MART-1, p53, MAGE-A3, or NY-ESO-1.

[0153] In embodiments, a T cell clone that expresses a TCR with high affinity for the target antigen may be isolated. Tumor-infiltrating lymphocytes (TILs) or peripheral blood mononuclear cells (PBMCs) can be cultured in the presence of antigen-presenting cells (APCs) pulsed with a peptide representing an epitope known to elicit a dominant T cell response when presented in the context of a defined HLA allele. High-affinity clones may be then be selected on the basis of MHC-peptide tetramer staining and/or the ability to recognize and lyse target cells pulsed with low titrated concentrations of cognate peptide antigen. After the clone has been selected, the TCRα and TCR chains or TCRγ and TCRδ chains are identified and isolated by molecular cloning. For example, for TCRα and TCR chains, the TCRα and TCR gene sequences are then used to generate an expression construct that ideally promotes stable, high-level expression of both TCR chains in human T cells. The transduction vehicle, for example, a gammaretrovirus or lentivirus, can then be generated and tested for functionality (antigen specificity and functional avidity) and used to produce a clinical lot of the vector. An aliquot of the final product can then be used to transduce the target T cell population (generally purified from patient PBMCs), which is expanded before infusion into the patient.

[0154] Various methods may be implemented to obtain genes encoding tumor-reactive TCR. More information is provided in Kershaw et al., Clin Transl Immunology. 2014 May; 3(5): e16. In embodiments, specific TCR can be derived from spontaneously occurring tumor-specific T cells in patients. Antigens included in this category include the melanocyte differentiation antigens MART-1 and gp100, as well as the MAGE antigens and NY-ESO-1, with expression in a broader range of cancers. TCRs specific for viral-associated malignancies can also be isolated, as long as viral proteins are expressed by transformed cells. Malignancies in this category include liver and cervical cancer, associated with hepatitis and papilloma viruses, and Epstein-Barr virus-associated malignancies. In embodiments, target antigens of the TCR may include CEA (e.g., for colorectal cancer), gp100, MART-1, p53 (e.g., for Melanoma), MAGE-A3 (e.g., Melanoma, esophageal and synovial sarcoma), NY-ESO-1 (e.g., for Melanoma and sarcoma as well as Multiple myelomas).

[0155] In embodiments, a binding domain of the first CAR binds CD19, and a binding domain of the second CAR binds tumor associated MUC1. In embodiments, the binding domain of the second CAR comprises: (i) a heavy chain complementary determining region 1 comprising the amino acid sequence of SEQ ID: 76 or 85, a heavy chain complementary determining region 2 comprising the amino acid sequence of SEQ ID: 77 or 86, and a heavy chain complementary determining region 3 comprising the amino acid sequence of SEQ ID: 78 or 87; and (ii) a light chain complementary determining region 1 comprising the amino acid sequence of SEQ ID: 73 or 82, a light chain complementary determining region 2 comprising the amino acid sequence of TRP-ALA-SER (WAS) or SEQ ID: 83, and a light chain complementary determining region 3 comprising the amino acid sequence of SEQ ID: 75 or 84.

[0156] In embodiments, the binding domain of the second CAR comprises: (i) a heavy chain complementary determining region 1 comprising the amino acid sequence of SEQ ID: 76, a heavy chain complementary determining region 2 comprising the amino acid sequence of SEQ ID: 77, and a heavy chain complementary determining region 3 comprising the amino acid sequence of SEQ ID: 78; and (ii) a light chain complementary determining region 1 comprising the amino acid sequence of SEQ ID: 73, a light chain complementary determining region 2 comprising the amino acid sequence of TRP-ALA-SER (WAS), and a light chain complementary determining region 3 comprising the amino acid sequence of SEQ ID: 75.

[0157] In embodiments, the binding domain of the second CAR comprises: (i) a heavy chain complementary determining region 1 comprising the amino acid sequence of SEQ ID: 85, a heavy chain complementary determining region 2 comprising the amino acid sequence of SEQ ID: 86, and a heavy chain complementary determining region 3 comprising the amino acid sequence of SEQ ID: 87; and (ii) a light chain complementary determining region 1 comprising the amino acid sequence of SEQ ID: 82, a light chain complementary determining region 2 comprising the amino acid sequence of SEQ ID: 83, and a light chain complementary determining region 3 comprising the amino acid sequence of SEQ ID: 84. In embodiments, the binding domain of the first CAR comprises the amino acid sequence of SEQ ID: 5 or 6. In embodiments, the binding domain of the second CAR comprises one of the amino acid sequences of SEQ ID: 70-72 and 79-81.

[0158] In embodiments, the first CAR comprises the first antigen binding domain, a transmembrane domain, a co-stimulatory domain, and a CD3 zeta domain and/or the second CAR comprises the second antigen binding domain, a transmembrane domain, a co-stimulatory domain, and a CD3 zeta domain.

[0159] In embodiments, the first CAR and the second CAR are expressed as separate polypeptides.

[0160] In embodiments, the cytoplasmic domain or the transmembrane domain of the second CAR is modified such that the second CAR is capable of activating the modified T cell via cells expressing CD19 without damaging the cells expressing CD19.

[0161] Embodiments described herein relate to a bispecific chimeric antigen receptor, comprising: a first antigen binding domain, a second antigen binding domain, a cytoplasmic domain, and transmembrane domain, wherein the first antigen binding domain recognizes a first antigen, and the second antigen binding domain recognizes a second antigen, the first antigen is different from the second antigen.

[0162] In embodiments, the first antigen and the second antigen do not express on the same cell. In embodiments, the first antigen is an antigen of a blood component, and the second antigen is an antigen of a solid tumor.

[0163] Blood cells refer to red blood cells (RBCs), white blood cells (WBCs), platelets, or other blood cells. For example, RBCs are blood cells of delivering oxygen (O₂) to the body tissues via the blood flow through the circulatory system. Platelets are cells that are involved in hemostasis, leading to the formation of blood clots. WBCs are cells of the immune system involved in defending the body against both infectious disease and foreign materials. There are a number of different types and sub-types of WBCs and each has a different role to play. For example, granulocytes, monocytes, and lymphocytes are 3 major types of white blood cell. There are three different forms of granulocytes: Neutrophils, Eosinophils, Basophils.

[0164] A cell surface molecule of a WBC refers to a molecule expressed on the surface of the WBC. For example, the cell surface molecule of a lymphocyte may include CD19, CD22, CD20, BCMA, CD5, CD7, CD2, CD16, CD56, and CD30. The cell surface molecule of a B cell may include CD19, CD20, CD22, BCMA. The cell surface molecule of a monocyte may include CD14, CD68, CD11b, CD18, CD169, and CD1c. The cell surface molecule of granulocyte may include CD33, CD38, CD138, and CD13.

[0165] In embodiments, the first antigen is CD19, and the second antigen is a tumor associated MUC1. In embodiments, the first antigen binding domain comprises one of the amino acid sequences of SEQ ID: 5 and 6. In embodiments, the second antigen binding domain comprises one of the amino acid sequence of SEQ ID: 70-72 and 79-81.

[0166] In embodiments, the present disclosure describes a method of enhancing T cell response in a subject or treating a tumor of the subject, the method comprising: administering an effective amount of modified T cell to the subject to provide a T cell response such that the CART cell is expanded in the blood of the subject via cells expressing CD19. In embodiments, the method may further comprise infusing B cells into the subject to continue to activate and/or expand the CAR T cells. For example, the B cells of the subject or genetically modified B cells from healthy donor may be obtained and stored before CAR T cell infusion. In embodiments, the method may further comprise administering a cell expressing CD19 or a polypeptide comprising at least an extracellular domain of CD19 or the antigen that the CAR T cells recognize. For example, the cell expressing CD19 may include cell lines such as K562 and NK92 that are transduced with nucleic acid sequences encoding CD19. In embodiments, the method may further comprise identifying CAR T cells expressing both first and second CAR, as well as administering the identifier CAR T cells to the subject. For example, MUC1 may be associated as a sorting marker such that CAR T cells expressing MUC1 may be identified timely.

[0167] In embodiments, the tumor associated MUC1 is expressed on tumor cells, but not on corresponding non-malignant cells. In embodiments, a scFv against the tumor associated MUC1 directly interacts with an o-glycosylated GSTA motif (SEQ ID NO. 88).

[0168] Embodiments described herein relate to a cell comprising the bispecific CAR and to an isolated nucleic acid encoding the bispecific CAR.

[0169] In embodiments, the present disclosure describes a method of in vivo cell expansion. In embodiments, the method may include administering an effective amount of T cell comprising a CAR to the subject to provide a T cell response; and administering an effective amount of presenting cells (e.g., T cells) expressing a soluble agent that an extracellular domain of the CAR recognizes. In embodiments, the method may be implemented to enhance T cell response in a subject. The method may include administering an effective amount of T cell comprising a CAR to the subject to provide a T cell response and administering an effective amount of presenting cells expressing a soluble agent that an extracellular domain of the CAR recognizes to enhance the T cell response in the subject. In certain embodiments, the presenting cells are T cells, dendritic cells, and/or antigen presenting cells. In certain embodiments, the enhancing T cell response in the subject may include selectively enhancing proliferation of T cell comprising the CAR. In embodiments, the method may be used to enhance treatment of a condition on a subject using CAR T cells. The method may include administering a population of cells that express an agent or administering an agent that is formulated as a vaccine. In these instances, the CART cells include a nucleic acid that encodes a CAR, and an extracellular domain of the CAR recognize the agent. In embodiments, the method may be implemented to enhance proliferation of CAR T cells in a subject having a disease. The method may include preparing CART cells comprising a CAR; administering an effective amount of the CART cells to the subject; introducing, into cells, a nucleic acid encoding an agent that an extracellular domain of the CAR recognizes; and administering an effective amount of the cells (introduced with the nucleic acid encoding the agent) to the subject. In embodiments, the T cell expansion may be measured based on an increase in copy number of CAR molecules in genomic DNA of the T cells. In embodiments, the T cell expansion may be measured based on flow cytometry analysis on molecules expressed on the T cells.

[0170] Embodiments described herein relate to an isolated T cell comprising a first CAR and a second CAR, wherein an antigen binding domain of the first CAR binds an antigen such as CD19, CD33, CD14, and BCMA, and an antigen binding domain of the second CAR binds a tumor associated MUC. In embodiments, the tumor associated MUC is MUC1 or MUC2. Embodiments described herein relate to a composition comprising a population of the isolated T cells and to a method of enhancing T cell response in a subject or treating a tumor of the subject, the method comprising: administering an effective amount of the isolated T cell.

[0171] In embodiments, the first CAR comprises the amino acid sequence of SEQ ID NO: 207, and the second CAR comprises the amino acid sequence of SEQ ID: 202. In embodiments, the first CAR comprises the amino acid sequence of SEQ ID NO: 203, 207, 216, or 219, and the second CAR comprises the amino acid sequence of SEQ ID: 202 or 205. In embodiments, the antigen binding domain of the second CAR comprises the amino acid sequence of SEQ ID NO: 70. In embodiments, the antigen binding domain of the second CAR comprises the amino acid sequence of SEQ ID NO: 5 or 6. In embodiments, the isolated T cell comprises a nucleic acid sequence of SEQ ID NO: 201, 204, 206, 208, 215, 217, 218, or 220. In embodiments, each of the first CAR and the second CAR comprises an antigen binding domain, a transmembrane domain, and a cytoplasmic domain.

[0172] In embodiments, the cytoplasmic domain comprises a co-stimulatory domain and a CD3 zeta domain.

[0173] In embodiments, the isolated T cell comprises a dominant negative variant of a receptor of programmed death 1 (PD-1), cytotoxic T lymphocyte antigen-4 (CTLA-4), B- and T-lymphocyte attenuator (BTLA), T cell immunoglobulin mucin-3 (TIM-3), lymphocyte-activation protein 3 (LAG-3), T cell immunoreceptor with Ig and ITIM domains (TIGIT), leukocyte-associated immunoglobulin-like receptor 1 (LAIRI), natural killer cell receptor 2B4 (2B4), or CD 160. In embodiments, the isolated T cell comprises a reduced amount of TCR, as compared to the corresponding wide-type T cell. Dominant negative mutations have an altered gene product that acts antagonistically to the wild-type allele. These mutations usually result in an altered molecular function (often inactive) and are characterized by a dominant or semi-dominant phenotype.

[0174] The present disclosure describes pharmaceutical compositions. The pharmaceutical compositions include one or more of the following CAR molecules, TCR molecules, modified CAR T cells, modified cells comprising CAR or TCR, modified cells, nucleic acids, and vectors described above. Pharmaceutical compositions are administered in a manner appropriate to the disease to be treated (or prevented). The quantity and frequency of administration will be determined by such factors as the condition of the patient, and the type and severity of the patient's disease, although appropriate dosages may be determined by clinical trials.

[0175] When “an immunologically effective amount”, “an anti-tumor effective amount”, “a tumor-inhibiting effective amount”, or “therapeutic amount” is indicated, the precise amount of the compositions of the present disclosure to be administered can be determined by a physician with consideration of individual differences in age, weight, tumor size, extent of infection or metastasis, and condition of the patient (subject). It can be stated that a pharmaceutical composition comprising the T cells described herein may be administered at a dosage of 10⁴ to 10⁹ cells/kg body weight, preferably 10⁹ to 10⁶ cells/kg body weight, including all integer values within those ranges. T cell compositions may also be administered multiple times at these dosages. The cells can be administered by using infusion techniques that are commonly known in immunotherapy (see, e.g., Rosenberg et al., New Eng. J. of Med. 319:1676, 1988). The optimal dosage and treatment regime for a particular patient can readily be determined by one skilled in the art of medicine by monitoring the patient for signs of disease and adjusting the treatment accordingly. In certain embodiments, it may be desired to administer activated T cells to a subject and then subsequently redraw the blood (or have apheresis performed), collect the activated and expanded T cells, and reinfuse the patient with these activated and expanded T cells. This process can be carried out multiple times every few weeks. In certain embodiments, T cells can be activated from blood draws of from 10 cc to 400 cc. In certain embodiments, T cells are activated from blood draws of 20 cc, 30 cc, 40 cc, 50 cc, 60 cc, 70 cc, 80 cc, 90 cc, or 100 cc. Not to be bound by theory, using this multiple blood draw/multiple reinfusion protocols, may select out certain populations of T cells.

[0176] The administration of the pharmaceutical compositions described herein may be carried out in any convenient manner, including by aerosol inhalation, injection, ingestion, transfusion, implantation, or transplantation. The compositions described herein may be administered to a patient subcutaneously, intradermally, intratumorally, intranodally, intramedullary, intramuscularly, by intravenous (i. v.) injection, or intraperitoneally. In embodiments, the T cell compositions described herein are administered to subjects by intradermal or subcutaneous injection. In embodiments, the T cell compositions of the present disclosure are administered by i.v. injection. The compositions of T cells may be injected directly into a tumor, lymph node, or site of infection. In embodiments, cells activated and expanded using the methods described herein, or other methods known in the art where T cells are expanded to therapeutic levels, are administered to patients in conjunction with (e.g., before, simultaneously or following) any number of relevant treatment modalities, including but not limited to treatment with agents for antiviral therapy, cidofovir and interleukin-2, Cytarabine (also known as ARA-C); or natalizumab treatment for MS patients; or efalizumab treatment for psoriasis patients or other treatments for PML patients. In further embodiments, the T cells described herein can be used in combination with chemotherapy, radiation, immunosuppressive agents, such as cyclosporin, azathioprine, methotrexate, mycophenolate, and FK506, antibodies, or other immunoablative agents such as CAM PATH, anti-CD3 antibodies or other antibody therapies, cytoxin, fludaribine, cyclosporin, FK506, rapamycin, mycophenolic acid, steroids, FR901228, cytokines, and irradiation. These drugs inhibit either the calcium dependent phosphatase calcineurin (cyclosporine and FK506) or inhibit the p70S6 kinase that is important for growth factor induced signaling (rapamycin). (Liu et al., Cell 66:807-815, 1991; Henderson et al., Immun 73:316-321, 1991; Bierer et al., Curr. Opin. Immun 5:763-773, 1993; Isoniemi (supra)). In embodiments, the cell compositions described herein are administered to a subject in conjunction with (e.g., before, simultaneously or following) bone marrow transplantation, T cell ablative therapy using either chemotherapy agents such as, fludarabine, external-beam radiation therapy (XRT), cyclophosphamide, or antibodies such as OKT3 or CAMPATH. In embodiments, the cell compositions described herein are administered following B-cell ablative therapy. For example, agents that react with CD20, e.g., Rituxan may be administered to patients. In embodiments, subjects may undergo standard treatment with high dose chemotherapy followed by peripheral blood stem cell transplantation. In certain embodiments, following the transplant, subjects receive an infusion of the expanded immune cells of the present disclosure. In embodiments, expanded cells are administered before or following surgery.

[0177] The dosage of the above treatments to be administered to a subject in need thereof will vary with the precise nature of the condition being treated and the recipient of the treatment. The scaling of dosages for human administration can be performed according to art-accepted practices by a physician depending on various factors.

[0178] Additional information on the methods of cancer treatment using engineered or modified T cells is provided in U.S. Pat. No. 8,906,682, incorporated by reference in its entirety.

[0179] Embodiments described herein relate to an in vitro method for preparing modified cells. The method may include obtaining a sample of cells from a subject. For example, the sample may include T cells or T cell progenitors. The method may further include transfecting the sample of cells with a DNA encoding at least a CAR and culturing the population of CAR cells ex vivo in a medium that selectively enhances proliferation of CAR-expressing T cells.

[0180] In embodiments, the sample is a cryopreserved sample. In embodiments, the sample of cells is from umbilical cord blood or a peripheral blood sample from the subject. In embodiments, the sample of cells is obtained by apheresis or venipuncture. In embodiments, the sample of cells is a subpopulation of T cells.

[0181] Embodiments of the present disclosure relate to a Zinc Finger Nuclease (ZFN) comprising a DNA-binding domain comprising zinc finger DNA binding proteins and a DNA-cleaving domain comprising a cleavage domain and/or a cleavage half-domain.

[0182] The zinc finger DNA binding proteins may include 1, 2, 3, 4, 5, 6 or more zinc fingers, each zinc finger having a recognition helix that binds a target subsite in the target gene. In certain embodiments, the zinc finger proteins comprise 3, or 4 or 5 or 6 fingers (where the fingers are designated F1, F2, F3, F4, F5 and F6 and ordered F1 to F3, F4 or F5 or F6 from N-terminus to C-terminus) and the fingers comprise the amino acid sequence of the recognition regions shown in Table 6.

[0183] Examples of the cleavage domain and/or a cleavage half-domain include a wild-type or an engineered Fokl cleavage half-domain. In embodiments, the DNA cleaving domain may comprise a wild-type cleavage domain or cleavage half-domain (e.g., a Fokl cleavage half-domain). In embodiments, the cleavage domain and/or a cleavage half-domain comprises engineered (non-naturally occurring) cleavage domains or cleavage half-domains, for example, engineered Fokl cleavage half-domains that form obligate heterodimers.

[0184] In embodiments, the gene is a human gene. In embodiments, the cleavage domain comprises a wild-type or engineered Fokl cleavage domain.

[0185] Embodiments relate to a polynucleotide encoding the isolated ZFN as described above. Embodiments relate to a vector comprising the polynucleotide. In embodiments, the vector is an adenoviral or lentiviral vector. Embodiments relate to an isolated cell or a cell line comprising the isolated ZFN described above.

[0186] In embodiments, the isolated cell is a stem cell, a T cell or a Natural Killer (NK) cell. In embodiments, the cell is a T cell derived from a primary human T cell isolated from a human donor. In embodiments, the cell has a reduced expression of an endogenous gene of CTLA4, LAG3, BTLA, TIM3, FOXP3, SIVA1, and LGALS9.

[0187] CTLA4 is an inhibitory receptor acting as a major negative regulator of T-cell responses. T lymphocyte receptor CTLA-4 binds costimulatory molecules CD80 (B7-1) and CD86 (B7-2) with higher avidity than stimulatory co-receptor CD28 and negatively regulates T cell activation. LAG3 is a member of the immunoglobulin superfamily and is expressed on the surface of activated T and NK cells. LAG3 has also been detected on the surface of B cells, dendritic cells, TILs and Tregs. Blockage of LAG3 significantly increases T cell proliferation and function. TIM3 is an immune checkpoint receptor constitutively expressed by CD4+T helper 1 (Th1), CD8+T cytotoxic 1 cells (Tc1) and Th17 cells. The interaction between TIM3 and its ligand galectin-9 LGALS9 is believed to result in suppression of T-cell responses. FOXP3 is a member of the forkhead/winged-helix family of transcriptional regulators, which is crucial for the development and inhibitory function of regulatory T-cells (Treg). SIVA1 induces CD27-mediated apoptosis, inhibits BCL2L1 isoform Bcl-x(L) anti-apoptotic activity, inhibits activation of NF-kappa-B, and promotes T-cell receptor-mediated apoptosis.

[0188] Embodiments relate to an isolated cell comprising isolated nucleic acid sequence encoding a chimeric antigen receptor (CAR), wherein an endogenous gene is inactivated using the ZFN described above.

[0189] In embodiments, the CAR comprises an antigen binding domain, a transmembrane domain, a co-stimulatory domain, and a CD3 zeta signaling domain.

[0190] In embodiments, the cell has a reduced graft-versus-host disease (GVHD) response in a bioincompatible human recipient as compared to the GVHD response of the primary human T cell.

[0191] In embodiments, the antigen binding domain of the CAR binds FZD10, TSHR, PRLR, Muc17, GUCY2C, CD207, CD19, or CD20.

[0192] In embodiments, the antigen binding domain of the CAR binds at one of B7, BCMA, CAIX, CD123, CD133, CD138, CD171, CD171/L1-CAM, CD19, CD2, CD22, CD30, CD33, CEA, cMet, CS1, CSPG4, Dectin1, EGFR, EGFR vIII, EphA2, ERBB receptors, ErbB T4, ERBB2, FAP, Folate receptor 1, FITC, Folate receptor 1, GD2, GPC3, HA-1 H/HLA-A2, HER2, IL-11Ra, IL13 receptor a2, IL13R, IL13Rα2 (zetakine), Kappa, LewisY, Mesothelin, MUC1, NKG2D, NY-ESO-1, PSMA, ROR-1, TRAIL-receptor1, or VEGFR2.

[0193] In embodiments, the co-stimulatory domain of the CAR comprises the intracellular domain of a costimulatory molecule selected from the group consisting of CD27, CD28, 4-1BB, OX40, CD30, CD40, PD-1, ICOS, lymphocyte function-associated antigen-1 (LFA-1), CD2, CD7, LIGHT, NKG2C, B7-H3, and any combination thereof.

[0194] In embodiments, the isolated cell or the cell line is a T cell comprising a nucleic acid sequence encoding hTERT or a nucleic acid encoding SV40LT, or a combination thereof. In embodiments, the T cell comprises a nucleic acid sequence encoding hTERT and a nucleic acid encoding SV40LT. In embodiments, the expression of hTERT is regulated by an inducible expression system. In embodiments, the expression of SV40LT gene is regulated by an inducible expression system. In embodiments, the inducible expression system is rTTA-TRE, which increases or activates the expression of SV40LT gene or hTERT gene, or a combination thereof. In embodiments, the T cell comprises a nucleic acid sequence encoding a suicide gene. In embodiments, the suicide gene includes a HSV-TK suicide gene system.

[0195] Embodiments relate to a method of treating cancer in a subject, the method comprising administering a genetically modified cell to the subject, wherein the cancer is selected from the group consisting of a lung carcinoma, pancreatic cancer, liver cancer, bone cancer, breast cancer, colorectal cancer, leukemia, ovarian cancer, lymphoma, and brain cancer.

[0196] Embodiments relate to a T/NK cell comprising a reduced amount of one or more peptides including PD1, PDL1, PDL2, CTLA4, LRBA, LAG3, Tim3, BILA, CD160, 2B4, SOCS1, SOCS3, Foxp3, CCR4, PVRIG, CD16B, SIVA1, CD33, LAGLS9, CD122, IDO1, CD45, Cvp1b1, TNFAIP8L2, ID02, TD02, DNMT3A, and/or Ceacam-1 (list 1), as compared to a corresponding wild-type cell. In embodiments, the T/NK cell has an enhanced T/NK cell response when the T cell is administrated into a subject.

[0197] Embodiments relate to T/NK cell comprising an increased amount of one or more peptides including Runx3, lexm, PILRA, Ptnns1L3, Fcgr3a, Nat8, Ccl9, Hck, Trem2, Ccl6, Cd36, Igf1, Ctss, Gzmc, Batf, Cxcl2, TNFAIP8L3,111b, TRPV1, TRPV2, TRPV3, TRPV4, Rgs1, PLSCR1, ITGB2, C3AR1, ITGA3, ITGA5, ITGAL, batf, batf3, Cxcl2, CARD11, and/or CD83 (list 2), as compared to a corresponding wild-type cell. In embodiments, the T/NK cell has an enhanced T cell response when the T/NK cell is administrated to a subject.

[0198] In embodiments, various gene editing techniques or overexpression techniques (e.g., Cas9, TALEN, and ZFN) may be used to regulate T/NK cell functions by knocking out/knocking down/overexpressing/inserting one or more genes. For example, the modified cell has reduced or increase expression of one or more genes of a biosynthesis or transportation pathway of a peptide in list 1 and list 2 (see above), as compared to the corresponding wild-type cell.

[0199] In embodiments, the target gene is Runx3. For example, the modified T/NK cell has increased expression of Runx3 as compared to the corresponding wild-type cell. In these instances, the increased expression of Runx3 may help, for example, T cells' infiltration or long-term residence within tumor cells, therefore increasing T cell killing effects.

[0200] For example, T cell response in a subject refers to cell-mediated immunity associated with helper, killer, regulatory, and other types T cells. For example, T-cell response may include activities such as assistance to other white blood cells in immunologic processes and identifying and destroying virus-infected cells and tumor cells. T-cell response in the subject may be measured via various indicators such as a number of virus-infected cells and/or tumor cells that T cells kill, an amount of cytokines that T cells release in co-culturing with virus-infected cells and/or tumor cells, a level of proliferation of T cells in the subject, a phenotype change of T cells (e.g., changes to memory T cells), and a level longevity or lifetime of T cells in the subject.

[0201] T cell response also includes the release of cytokines. Although cytokine release is often associated with systemic inflammation and complication of disease, the release of cytokines appear to be also associated with the efficacy of a CAR T cell therapy. The release of cytokines may correlate with expansion and progressive immune activation of adoptively transferred cells, such as in CAR T cell therapy. The present disclosure describes the release of effector cytokines, such as IFN-γ, and pro- and anti-inflammatory cytokines, such as IL-6, in response to CAR T cell therapy, especially in response to the presence of a first CAR and second CAR. In embodiments, the present disclosure describes the release of IL-6 and IFN-γ in a subject introduced with the first CAR and second CAR described herein. In embodiments, the subject is in need of cancer treatment, and the cancer treatment is pancreatic cancer treatment. In embodiments, the present disclosure describes determining the efficacy or monitoring the efficacy of a CAR T cell therapy by measuring the level of cytokine release. In embodiments, the release of cytokines (e.g., IL-6 and/or IFN-γ) in the subject in response to CAR T cell therapy using T cells comprising the first and the second CARs is more than that using T cells comprising the second CAR without the first CARs.

[0202] The present disclosure is further described by reference to the following exemplary embodiments and examples. These exemplary embodiments and examples are provided for purposes of illustration only and are not intended to be limiting unless otherwise specified. Thus, the present disclosure should in no way be construed as being limited to the following exemplary embodiments and examples, but rather, should be construed to encompass any and all variations which become evident as a result of the teaching provided herein.

### EXEMPLARY EMBODIMENTS

[0203] The following are exemplary embodiments:

1. A nucleic acid encoding a first chimeric antigen receptor (CAR) and a second CAR, wherein a binding domain of the first CAR binds a cell surface molecule of a white blood cell (WBC), and a binding domain of the second CAR binds an antigen different from the cell surface molecule of a WBC.
2. A vector comprising the nucleic acid of embodiment 1.
3. A cell comprising the nucleic acid of embodiment 1.
4. A cell comprising a first CAR and a second CAR, wherein a binding domain of the first CAR binds a cell surface molecule of a cell surface molecule of a WBC, and a binding domain of the second CAR binds an antigen different from the cell surface molecule of a WBC.
5. The cell of any one of embodiments 1-4, wherein the cell is a T cell, NK cell, or dendritic cells.
6. A composition comprising a population of the cells of any one of embodiments 3-5.
7. A method of culturing the cells of any one of embodiments 3-5, the method comprising: obtaining the cell of any one of embodiments 3-5, wherein a binding domain of the first CAR binds a cell surface molecule of a cell surface molecule of a WBC, and a binding domain of the second CAR binds an antigen different from the cell surface molecule of a WBC; and culturing the cell in the presence of an agent derived from the cell surface molecule of the WBC cell or from an antigen to which a second CAR binds.
8. The method of embodiment 7, wherein the agent is an extracellular domain of the cell surface molecule of the WBC.
9. A method for in vitro CAR cell preparation, the method comprising:
providing cells;
introducing a nucleic acid encoding a first CAR and a second CAR into the cells, wherein a binding domain of the first CAR binds a cell surface molecule of a WBC, and a binding domain of the second CAR binds an antigen different from the cell surface molecule of the WBC; and culturing the cells in the presence of an agent derived from the cell surface molecule of the WBC or from an antigen to which the second CAR binds.
10. A method of enhancing T cell response in a subject or treating a tumor of the subject, the method comprising: administering an effective amount of T cell comprising a first CAR and a second CAR to the subject to provide a T cell response, wherein a binding domain of the first CAR binds a cell surface molecule of a WBC, and a binding domain of the second CAR binds an antigen different from the cell surface molecule of the WBC, and wherein the T cell response is measured by the number of copies of CAR(s) and/or the amount of cytokine released (e.g., IL-6 and IFN-γ). In embodiments, the T cell response is enhanced as compared to T cells that include the second CAR but don't comprise the first CAR.
11. The method of embodiment 10, wherein enhancing the T cell response in the subject comprises selectively enhancing proliferation of T cell comprising the first and second CARs in vivo.
12. A method of expanding cells expressing CAR in vivo, the method comprising: administering an effective amount of T cell comprising a first CAR and a second CAR to the subject, wherein a binding domain of the first CAR binds a cell surface molecule of a WBC, and a binding domain of the second CAR binds an antigen different from the cell surface molecule of the WBC, the cells being T cells, NK cells, or dendritic cells.
13. The nucleic acid, the vector, the cell, the composition, or the method of any one of embodiments 1-12, wherein the antigen different from the cell surface molecule of the WBC is CD19, CD22, CD20, BCMA, CD5, CD7, CD2, CD16, CD56, CD30, CD14, CD68, CD11b, CD18, CD169, CD1c, CD33, CD38, CD138, CD13, B7, CAIX, CD123, CD133, CD171, CD171/L1-CAM, CEA, Claudin 18.2, cMet, CS1, CSPG4, Dectin1, EGFR, EGFR vIII, EphA2, ERBB receptors, ErbB T4, ERBB2, FAP, Folate receptor 1, FITC, Folate receptor 1, FSH, GD2, GPC3, HA-1 H/HLA-A2, HER2, IL-11Ra, IL13 receptor a2, IL13R, IL13Rα2 (zetakine), Kappa, Leukemia, LewisY, Mesothelin, MUC1, NKG2D, NY-ESO-1, PSMA, ROR-1, TRAIL-receptor1, or VEGFR2.
14. The nucleic acid, the vector, the cell, the composition, or the method of embodiment 13, wherein the MUC1 is a tumor-exclusive epitope of a human MUC1, and the first CAR and the second CAR are expressed as separate polypeptides.
15. The nucleic acid, the vector, the cell, the composition, or the method of embodiment 13, wherein the MUC1 is a tumor form of human MUC1 (tMUC1).
16. The nucleic acid, the vector, the cell, the composition, or the method of any one of embodiments 1-12, wherein the WBC is a granulocyte, a monocyte, or lymphocyte.
17. The nucleic acid, the vector, the cell, the composition, or the method of any one of embodiments 1-12, wherein the WBC is a B cell.
18. The nucleic acid, the vector, the cell, the composition, or the method of any one of embodiments 1-12, wherein the cell surface molecule of the WBC is CD19, CD22, CD20, BCMA, CD5, CD7, CD2, CD16, CD56, CD30, CD14, CD68, CD11b, CD18, CD169, CD1c, CD33, CD38, CD138, or CD13.
19. The nucleic acid, the vector, the cell, the composition, or the method of any one of embodiments 1-12, wherein the cell surface molecule of the WBC is CD19, CD20, CD22, or BCMA.
20. The nucleic acid, the vector, the cell, the composition, or the method of any one of embodiments 1-12, wherein the cell surface molecule of the WBC is CD19.
21. The nucleic acid, the vector, the cell, the composition, or the method of any one of embodiments 1-12, wherein the first CAR comprises the first antigen binding domain, a transmembrane domain, a co-stimulatory domain, and a CD3 zeta domain; and/or the second CAR comprises the second antigen binding domain, a transmembrane domain, a co-stimulatory domain, and a CD3 zeta domain.
22. The nucleic acid, the vector, the cell, the composition, or the method of any one of embodiments 1-12, wherein the co-stimulatory domain comprises the intracellular domain of CD27, CD28, 4-1BB, OX40, CD30, CD40, PD-1, ICOS, lymphocyte function-associated antigen-1 (LFA-1), CD2, CD7, LIGHT, NKG2C, B7-H3, a ligand that specifically binds with CD83, or a combination thereof.
23. The nucleic acid, the vector, the cell, the composition, or the method of any one of embodiments 1-12, wherein the antigen binding domain is a Fab or a scFv.
24. The nucleic acid, the vector, the cell, the composition, or the method of any one of embodiments 1-12, wherein the first CAR comprises the amino acid sequence of SEQ ID NO: 5, 6, 53 and 54, 55 and 56, or 57 and 58, and the second CAR comprises the amino acid sequence of SEQ ID NO: 5-17, 29, 33, 37, 71, or 72, or the amino acid sequence encoded by nucleic acid sequence SEQ ID NO: 41, 45, 63, 67, or 68.
25. The nucleic acid, the vector, the cell, the composition, or the method of any one of embodiments 1-12, wherein a nucleic acid encoding the first CAR comprises the nucleic acid sequence of SEQ ID NO: 59, or 60, and a nucleic acid sequence encoding the second CAR comprises the nucleic acid sequence of SEQ ID NO: 61.
26. The nucleic acid, the vector, the cell, the composition, or the method of any one of embodiments 1-12, wherein the nucleic acid comprises one of the nucleic acid sequences of SEQ ID NO: 62-69.
27. The nucleic acid, the vector, the cell, the composition, or the method of any one of embodiments 1-12, wherein the first CAR and the second CAR are expressed as separate polypeptides.
28. A modified T cell comprising a first CAR and a second CAR, wherein a binding domain of the first CAR binds CD19, and a binding domain of the second CAR binds tumor associated MUC1.
29. The modified T cell of embodiment 28, wherein the binding domain of the second CAR comprises:
(i) a heavy chain complementary determining region 1 comprising the amino acid sequence of SEQ ID: 76 or 85, a heavy chain complementary determining region 2 comprising the amino acid sequence of SEQ ID: 77 or 86, and a heavy chain complementary determining region 3 comprising the amino acid sequence of SEQ ID: 78 or 87; and (ii) a light chain complementary determining region 1 comprising the amino acid sequence of SEQ ID: 73 or 82, a light chain complementary determining region 2 comprising the amino acid sequence of TRP-ALA-SER (WAS) or SEQ ID: 83, and a light chain complementary determining region 3 comprising the amino acid sequence of SEQ ID: 75 or 84.
30. The modified T cell of embodiment 28, wherein the binding domain of the second CAR comprises:
(i) a heavy chain complementary determining region 1 comprising the amino acid sequence of SEQ ID: 76, a heavy chain complementary determining region 2 comprising the amino acid sequence of SEQ ID: 77, and a heavy chain complementary determining region 3 comprising the amino acid sequence of SEQ ID: 78; and (ii) a light chain complementary determining region 1 comprising the amino acid sequence of SEQ ID: 73, a light chain complementary determining region 2 comprising the amino acid sequence of TRP-ALA-SER (WAS), and a light chain complementary determining region 3 comprising the amino acid sequence of SEQ ID: 75.
31. The modified T cell of embodiment 28, wherein the binding domain of the second CAR comprises: (i) a heavy chain complementary determining region 1 comprising the amino acid sequence of SEQ ID: 85, a heavy chain complementary determining region 2 comprising the amino acid sequence of SEQ ID: 86, and a heavy chain complementary determining region 3 comprising the amino acid sequence of SEQ ID: 87; and (ii) a light chain complementary determining region 1 comprising the amino acid sequence of SEQ ID: 82, a light chain complementary determining region 2 comprising the amino acid sequence of SEQ ID: 83, and a light chain complementary determining region 3 comprising the amino acid sequence of SEQ ID: 84.
32. The modified T cell of embodiment 28, wherein the binding domain of the first CAR comprises the amino acid sequence of SEQ ID: 5 or 6.
33. The modified T cell of embodiment 28, wherein the binding domain of the second CAR comprises one of the amino acid sequences of SEQ ID: 70-72 and 79-81.
34. The modified T cell of any one of embodiments 28-33, wherein the first CAR comprises the first antigen binding domain, a transmembrane domain, a co-stimulatory domain, and a CD3 zeta domain and/or the second CAR comprises the second antigen binding domain, a transmembrane domain, a co-stimulatory domain, and a CD3 zeta domain.
35. The modified T cell of embodiment 34, wherein the co-stimulatory domain comprises the intracellular domain of CD27, CD28, 4-1BB, OX40, CD30, CD40, PD-1, ICOS, lymphocyte function-associated antigen-1 (LFA-1), CD2, CD7, LIGHT, NKG2C, B7-H3, a ligand that specifically binds with CD83, or a combination thereof.
36. The modified T cell of any one of embodiments 28-35, wherein the first CAR and the second CAR are expressed as gene products that are separate polypeptides.
37. The modified T cell of any one of embodiments 28-35, wherein a cytoplasmic domain or a transmembrane domain of the second CAR is modified such that the second CAR is capable of activating the modified T cell via cells expressing CD19 without damaging the cells expressing CD19.
38. A bispecific CAR, comprising:
a first antigen binding domain, a second antigen binding domain, a cytoplasmic domain, and a transmembrane domain, wherein the first antigen binding domain recognizes a first antigen, the second antigen binding domain recognize a second antigen, and the first antigen is different from the second antigen.
39. The bispecific CAR of embodiment 38, wherein the first antigen and the second antigen are not expressed on the same cell.
40. The bispecific CAR of embodiment 38, wherein the first antigen is an antigen of a blood component, and the second antigen is an antigen of a solid tumor.
41. The bispecific CAR of embodiment 38, wherein the first antigen is CD19, and the second antigen is a tumor associated MUC1.
42. The bispecific CAR of embodiment 38, wherein the first antigen binding domain comprises amino acid sequence of SEQ ID: 5 or 6.
43. The modified T cell of embodiment 28, wherein the second antigen binding domain comprises one of the amino acid sequences of SEQ ID: 70-72 and 79-81.
44. A method of enhancing T cell response in a subject or treating a tumor of the subject, the method comprising: administering an effective amount of the modified T cell of any one of embodiments 28-37 to the subject to provide a T-cell response such that the modified T cell is expanded in the blood of the subject via cells expressing CD19.
45. The modified T cell of any one of embodiments 28-37, wherein the tumor associated MUC1 is expressed on tumor cells and not on corresponding non-malignant cells.
46. The modified T cells of any one of embodiments 28-37, wherein the binding domain of the second CAR comprises a scFv against the tumor associated MUC1 that directly interacts with an o-glycosylated GSTA motif (SEQ ID NO. 88).
47. A cell comprising the bispecific CAR of any one of embodiments 38-43.
48. A nucleic acid encoding the bispecific CAR of any one of embodiments 38-43.
49. A nucleic acid encoding a first CAR and a second CAR, wherein a binding domain of the first CAR binds an antigen selected from the group consisting of CD19, CD33, CD14, and BCMA, and a binding domain of the second CAR binds a tumor associated MUC1.
50. A T cell comprising a first CAR and a second CAR, wherein a binding domain of the first CAR binds an antigen selected from the group consisting of CD19, CD33, CD14, and BCMA, a binding domain of the second CAR binds a tumor associated MUC1.
51. A T cell comprising a first nucleic acid encoding a first CAR and a second nucleic acid encoding a second CAR, wherein a binding domain of the first CAR binds an antigen selected from the group consisting of CD19, CD33, CD14, and BCMA, a binding domain of the second CAR binds a tumor associated MUC1.
52. A composition comprising a population of the T cells of embodiment 50 or 51.
53. The T cell of embodiment 50 or 51, wherein the first CAR and the second CAR are expressed as separate polypeptides.
54. The nucleic acid of embodiment 1 or the T cell of embodiment 50 or 51, wherein the nucleic acid comprises one of the nucleic acid sequences of SEQ ID NO: 201, 204, 206, 208, 209, 211, 213-215, 217, 218, 220-225, 227, 228, 230-235, 237, 238, 240-244, 247, 249-254, 256, 257, 259, and 260-263.
55 The nucleic acid of embodiment 49 or the T cell of embodiment 50 or 51, wherein the nucleic acid comprises one of the nucleic acid sequences of SEQ ID NO: 201, 204, 206, 208, 215, 217, 218, and 220.
56. The nucleic acid of embodiment 49 or the cell of embodiment 50 or 51, wherein the first CAR comprises the amino acid sequence of SEQ ID NO: 203, 207, 216, 219, 226, 229, 236, 239, 245, 248, 255, or 258, and the second CAR comprises the amino acid sequence of SEQ ID: 202, 205, 210, or 212.
57. The nucleic acid of embodiment 49 or the cell of embodiment 50 or 51, wherein the first CAR comprises the amino acid sequence of SEQ ID NO: 207, and the second CAR comprises the amino acid sequence of SEQ ID NO: 202.
58. The nucleic acid of embodiment 49 or the cell of embodiment 50 or 51, wherein the first CAR comprises the amino acid sequence of SEQ ID NO: 203, 207, 216, or 219, and the second CAR comprises the amino acid sequence of SEQ ID NO: 202 or 205.
59. A vector comprising the nucleic acid of embodiment 49.
60. A cell comprising the nucleic acid of embodiment 49.
61. A composition comprising a population of the cells of embodiment 60.
62. The cell of embodiments 60 or 61, wherein the cell is a T cell, NK cell, or dendritic cells.
63. A genetically modified T cell comprising one or more nucleic acids encoding a CAR and one or more TCR chains or a TCR of an innate T cell.
64. The genetically modified T cell of embodiment 63, wherein the nucleic acid encoding the one or more TCR chains or a TCR of an innate T cell is a nucleic acid insert within a target genomic locus.
65. The genetically modified T cell of embodiment 63, wherein integration of the nucleic acid insert causes replacement of at least of a portion of a gene at the target genomic locus.
66. The genetically modified T cell of embodiment 63, wherein the nucleic acid is introduced into the T cell using a nuclease agent.
67. A method of modifying a target genomic locus in a T cell, the method comprising: introducing into the T cell a nuclease agent that makes a single or double-strand break within the target genomic locus; and introducing into the T cell a nucleic acid insert comprising a nucleic acid encoding one or more TCR chains or a TCR of an innate T cell; and selecting the T cell comprising the nucleic acid insert integrated into the target genomic locus.
68. The method of embodiment 67, wherein the nucleic acid insert is flanked by a 5′ homology arm and a 3′ homology arm, and the 3′ homology arm of the nucleic acid insert and the 5′ homology arm of the nucleic acid insert are homologous to corresponding genomic segments within the target genomic locus.
69. The method of embodiment 67, wherein the target genomic locus is modified by integration of the nucleic acid insert between the corresponding genomic segments.
70. The method of embodiment 67, wherein the nuclease agent is a zinc finger nuclease (ZFN), a Transcription Activator-Like Effector Nuclease (TALEN), or a meganuclease.
71. The method of embodiment 67, wherein the nuclease agent comprises a Clustered Regularly Interspaced Short Palindromic Repeats (CRISPR)-associated (Cas) protein and a guide RNA (gRNA).
72. The method of embodiment 71, wherein the Cas protein is Cas9.
73. The genetically modified T cell or the method of any one of embodiments 63-72, wherein the innate T cell comprises a γδ T cell, an iNKT cell, or a MAIT cell.
74. The genetically modified T cell or the method of any one of embodiments 63-72, wherein the innate T cell comprises a γδ T cell.
75. The genetically modified T cell or the method of any one of embodiments 63-72, wherein the innate T cell comprises a Vy9Vδ2 T cell.
76. The genetically modified T cell or the method of embodiment 75, wherein the one or more nucleic acids encoding one or more TCR chains encodes a TCR γ chain and a TCR δ chain.
77. The genetically modified T cell or the method of embodiment 75, wherein the one or more nucleic acids encoding one or more TCR chains encodes an endogenous TCR γ chain and an endogenous TCR δ chain.
78. The genetically modified T cell or the method of embodiment 75, wherein the nucleic acid insert comprises a nucleic acid that corresponds to one or more the amino acid sequences of SEQ ID No.: 99 and 185, or a combination thereof.
79. The genetically modified T cell or the method of any one of embodiments 63-72, wherein the innate T cell comprises an iNKT cell.
80. The genetically modified T cell or the method of embodiment 79, wherein the nucleic acid encoding the TCR of an innate T cell encodes an iNKT α chain and/or an iNKT β chain.
81. The genetically modified T cell or the method of embodiment 79, wherein the nucleic acid encoding the TCR of an innate T cell encodes an endogenous iNKT α chain or an endogenous iNKT β chain.
82. The genetically modified T cell or the method of any one of embodiments 63-72, wherein the innate T cell comprises a MAIT cell.
83. The genetically modified T cell or the method of embodiment 82, wherein the nucleic acid encoding the TCR of an innate T cell encodes a MAIT α chain and/or a MAIT β chain.
84. The genetically modified T cell or the method of embodiment 82, wherein the nucleic acid encoding the TCR of an innate T cell encodes an endogenous MAIT α chain or an endogenous MAIT β chain.
85. The genetically modified T cell or the method of any one of embodiments 63-84, wherein the target genomic locus is a or β TCR gene locus of an αβ T cell.
86. The genetically modified T cell or the method of any one of embodiments 63-84, wherein the integration of the nucleic acid insert causes replacement a sequence at α or β TCR gene locus of an αβ T cell such that expression of overall endogenous TCR is not reduced.
87. The genetically modified T cell or the method of any one of embodiments 63-84, wherein corresponding genomic segments of the target genomic locus comprise the amino acid sequence of a chain of TCR.
88. The genetically modified T cell or the method of any one of embodiments 63-84, wherein the genetically modified cell elicits a reduced graft versus host disease response against allogeneic cells as compared to a corresponding cell that does not include nucleic acid sequence.
89. The genetically modified T cell or the method of any one of embodiments 63-84, wherein the T cell is a T cell derived from a primary human T cell isolated from a human donor.
90. The genetically modified T cell or the method of any one of embodiments 63-84, wherein the T cell comprises a CAR.
91. The genetically modified cell or the method of any one of embodiments 63-90, wherein the genetically modified cell has functional TCRs comprising the one or more TCR chains.
92. The genetically modified cell or the method of any one of embodiments 63-90, wherein the TCR of the innate T cells and αβ TCR originate from the donor.
93. The genetically modified cell or the method of any one of embodiments 63-92, wherein the innate T cell exhibits a non-MHC class I or II restriction requirement for antigen recognition.
94. A method of causing a T-cell response in a subject or treating a tumor of the subject, the method comprising: administering an effective amount of the T cell of any one of embodiments 63-92.
95. A nucleic acid encoding a binding molecule comprising a first domain and a second binding domain, wherein the first binding domain and the second binding domain bind to an antigen.
96. The nucleic acid of embodiment 95, wherein one or more targeting antigen binding sites of the first binding domain and the second binding domain are different, and the binding molecule is a CAR comprising the first binding domain, a linker, the second binding domain, a transmembrane domain, and a co-stimulatory domain and/or a CD3 zeta domain.
97. The nucleic acid of embodiment 95, wherein the antigen is Epidermal growth factor receptor (EGFR), Variant III of the epidermal growth factor receptor (EGFRvIII), Human epidermal growth factor receptor 2 (HER2), Mesothelin (MSLN), Prostate-specific membrane antigen (PSMA), Carcinoembryonic antigen (CEA), Disialoganglioside 2 (GD2), Interleukin-13Ra2 (IL13Rα2), Glypican-3 (GPC3), Carbonic anhydrase IX (CAIX), L1 cell adhesion molecule (L1-CAM), Cancer antigen 125 (CA125), Cluster of differentiation 133 (CD133), Fibroblast activation protein (FAP), Cancer/testis antigen 1B (CTAG1B), Mucin 1 (MUC1), Folate receptor-α (FR-α), CD19, FZD10, TSHR, PRLR, Mucin 17 (MUC17), GUCY2C, CD207, CD3, CD5, B-Cell Maturation Antigen (BCMA), or CD4.
98. The nucleic acid of embodiment 95, wherein the first binding domain binds tumor associated Mud, TSHR, FZD10, PRLR, Mucin 16 (MUC16), MUC17, GUCY2C, CD207, CLDN18.2, CLDN6, or SIGL1C.
99. The nucleic acid of embodiment 95, wherein the nucleic acid encodes a polypeptide comprising one of the amino acid sequences of SEQ ID NO: 264 and 265.
100. A vector comprising a nucleic acid of any one of embodiments 95-99.
101. A host cell transformed or transfected with the nucleic acid of any one of embodiments 95-99 or with the vector of embodiment 100.
102. A method for the production of a binding molecule encoded by the nucleic acid of any one of embodiments 95-99, the method comprising culturing a host cell of embodiment 101 under conditions allowing expression of the binding molecule of any one of embodiments 95-99 and recovering the binding molecule from the culture.
103. A pharmaceutical composition comprising a binding molecule encoded by the nucleic acid of any one of embodiments 95-99 or produced according to the method of embodiment 102.
104. A kit comprising a binding molecule encoded by the nucleic acid of any one of embodiments 95-99, a nucleic acid of any one of embodiments 95-99, a vector of embodiment 100, and/or a host cell of embodiment 101.
105. A method for the treatment or amelioration of a disease, comprising administering to a subject in need thereof the binding molecule encoded by the nucleic acid of any one of embodiments 95-99.
106. A nucleic acid encoding a first antigen binding molecule and a second antigen binding molecule, wherein a binding domain of the first antigen binding molecule binds a cell surface molecule of a WBC, and a binding domain of the second antigen binding molecule binds a solid tumor antigen that is different from the cell surface molecule of the WBC.
107. A vector comprising the nucleic acid of embodiment 106.
108. A cell comprising the nucleic acid of embodiment 106.
109. A cell comprising a first antigen binding molecule and a second antigen binding molecule, wherein a binding domain of the first antigen binding molecule binds a cell surface molecule of a WBC, and a binding domain of the second antigen binding molecule binds a solid tumor antigen that is different from the cell surface molecule of a WBC.
110. A composition comprising a population of the cell of any one of embodiments 108-109.
111. The cell of any one of embodiments 108-109, wherein the cell is a T cell, NK cell, or dendritic cells.
112. A method of culturing cells, the method comprising: obtaining a cell comprising a first antigen binding molecule and a second antigen binding molecule, wherein a binding domain of the first antigen binding molecule binds a cell surface molecule of a WBC, and a binding domain of the second antigen binding molecule binds a solid tumor antigen that is different from the cell surface molecule of the WBC; and culturing the cell in the presence of an agent derived from the cell surface molecule of the WBC or from an antigen to which the second antigen binding molecule binds.
113. The method of embodiment 112, wherein the agent is an extracellular domain of the cell surface molecule of the WBC.
114. A method for in vitro cell preparation, the method comprising: preparing cells; introducing a nucleic acid encoding a first antigen binding molecule and a second antigen binding molecule into the cells, a binding domain of the first antigen binding molecule binding to a cell surface molecule of a WBC, and a binding domain of the second antigen binding molecule binding to an antigen different from the cell surface molecule of the WBC; and culturing the cells in the presence of an agent derived from the cell surface molecule of the WBC or from an antigen to which the second antigen binding molecule binds.
115. A method of enhancing T cell response in a subject or treating a tumor of the subject, the method comprising: administering an effective amount of T cell comprising a first antigen binding molecule and a second antigen binding molecule to the subject to provide a T cell response, wherein a binding domain of the first antigen binding molecule binds a cell surface molecule of a WBC, and a binding domain of the second antigen binding molecule binds an antigen different from the cell surface molecule of the WBC.
116. The method of embodiment 115, wherein enhancing T cell response in the subject comprises selectively enhancing proliferation of T cell comprising the first antigen binding molecule and the second antigen binding molecule in vivo.
117. A method of expanding cells expressing an antigen binding molecule in vivo, the method comprising: administering an effective amount of T cell comprising a first antigen binding molecule and a second antigen binding molecule to the subject, wherein a binding domain of the first antigen binding molecule binds a cell surface molecule of a WBC, and a binding domain of the second antigen binding molecule binds a solid tumor antigen that is different from the cell surface molecule of the WBC, the cells being T cells, NK cells, or dendritic cells.
118. The nucleic acid, the vector, the cell, or the method of any one of embodiments 106-117, wherein the first antigen binding molecule is a first chimeric antigen receptor (CAR) and the second antigen binding molecule is a second CAR.
119. The nucleic acid, the vector, the cell, or the method of embodiment 118, wherein the antigen different from the cell surface molecule of the WBC is CD19, CD22, CD20, BCMA, CD5, CD7, CD2, CD16, CD56, CD30, CD14, CD68, CD11b, CD18, CD169, CD1c, CD33, CD38, CD138, CD13, B7, CAIX, CD123, CD133, CD171, CD171/L1-CAM, CEA, Claudin 18.2, cMet, CS1, CSPG4, Dectin1, EGFR, EGFR vIII, EphA2, ERBB receptors, ErbB T4, ERBB2, FAP, Folate receptor 1, FITC, Folate receptor 1, FSH, GD2, GPC3, HA-1 H/HLA-A2, HER2, IL-11Ra, IL13 receptor a2, IL13R, IL13Rα2 (zetakine), Kappa, Leukemia, LewisY, Mesothelin, MUC1, NKG2D, NY-ESO-1, PSMA, ROR-1, TRAIL-receptor1, or VEGFR2.
120. The nucleic acid, the vector, the cell, or the method of embodiment 118, wherein the MUC1 is a tumor-exclusive epitope of a human MUC1, and the first CAR and the second CAR are expressed as polypeptides.
121. The nucleic acid, the vector, the cell, or the method of embodiment 118, wherein the MUC1 is a tumor form of human MUC1 (tMUC1).
122. The nucleic acid, the vector, the cell, or the method of embodiment 118, wherein the WBC is a granulocyte, a monocyte and or lymphocyte.
123. The nucleic acid, the vector, the cell, or the method of embodiment 118, wherein the WBC is a B cell.
124. The nucleic acid, the vector, the cell, or the method of embodiment 118, wherein the cell surface molecule of the WBC is CD19, CD22, CD20, BCMA, CD5, CD7, CD2, CD16, CD56, CD30, CD14, CD68, CD11b, CD18, CD169, CD1c, CD33, CD38, CD138, or CD13, or the cell surface molecule of the WBC is CD19, CD20, CD22, or BCMA.
125. The nucleic acid, the vector, the cell, or the method of embodiment 118, wherein the cell surface molecule of the WBC is CD19.
126. The nucleic acid, the vector, the cell, or the method of embodiment 118, wherein the first CAR comprises the first antigen binding domain, a transmembrane domain, a co-stimulatory domain, and a CD3 zeta domain and/or the second CAR comprises the second antigen binding domain, a transmembrane domain, a co-stimulatory domain, and a CD3 zeta domain.
127. The nucleic acid, the cell, or the method of embodiment 110, wherein the co-stimulatory domain comprises the intracellular domain of a co-stimulatory molecule selected from the group consisting of CD27, CD28, 4-1BB, OX40, CD30, CD40, PD-1, ICOS, lymphocyte function-associated antigen-1 (LFA-1), CD2, CD7, LIGHT, NKG2C, B7-H3, a ligand that specifically binds with CD83, or a combination thereof.
128. The nucleic acid, the vector, the cell, or the method of embodiment 118, wherein the antigen binding domain is a Fab or a scFv.
129. The nucleic acid, the vector, the cell, or the method of embodiment 118, wherein the first CAR comprises the amino acid sequence of SEQ ID NO: 5, 6, 53 and 54, 55 and 56, or 57 and 58, and the second CAR comprises the amino acid sequence of one of SEQ ID NOs: 5-17, 29, 33, 37, 71, and 72, or the amino acid sequence encoded by the nucleic acid of SEQ ID NO: 41, 45, 63, 67, or 68.
130. The nucleic acid, the vector, the cell, or the method of embodiment 118, wherein a nucleic acid encoding the first CAR comprises the nucleic acid sequence of SEQ ID NO: 59, or 60, and a nucleic acid encoding the second CAR comprises the nucleic acid sequence of SEQ ID NO: 61.
131. The nucleic acid, the vector, the cell, or the method of embodiment 118, wherein the nucleic acid comprises one of the nucleic acid sequence of SEQ ID NO: 62-69.
132. The nucleic acid, the vector, the cell, or the method of embodiment 118, wherein the first CAR and the second CAR are expressed as gene products that are separate polypeptides.
133. The nucleic acid, the vector, the cell, or the method of any one of embodiments 106-132, wherein the first antigen binding molecule is a chimeric antigen receptor (CAR) and the second antigen binding molecule is a T Cell Receptor (TCR).
134. The nucleic acid, the vector, the cell, or the method of embodiment 133, wherein the TCR is modified TCR.
135. The nucleic acid, the vector, the cell, or the method of embodiment 133, wherein the TCR is derived from spontaneously occurring tumor-specific T cells in patients.
136. The nucleic acid, the cell, or the method of embodiment 133, wherein the TCR binds a tumor antigen.
137. The nucleic acid, the vector, the cell, or the method of embodiment 133, wherein the tumor antigen comprises CEA, gp100, MART-1, p53, MAGE-A3, or NY-ESO-1, or the TCR comprises TCRγ and TCRδ Chains or TCRα and TCR chains, or a combination thereof.
138. A modified T cell comprising a first CAR and a second CAR, wherein a binding domain of the first CAR binds CD19, and a binding domain of the second CAR binds tumor associated MUC1.
139. The modified T cell of embodiment 138, wherein the binding domain of the second CAR comprises: (i) a heavy chain complementary determining region 1 comprising the amino acid sequence of SEQ ID: 76 or 85, a heavy chain complementary determining region 2 comprising the amino acid sequence of SEQ ID: 77 or 86, and a heavy chain complementary determining region 3 comprising the amino acid sequence of SEQ ID: 78 or 87; and (ii) a light chain complementary determining region 1 comprising the amino acid sequence of SEQ ID: 73 or 82, a light chain complementary determining region 2 comprising the amino acid sequence of TRP-ALA-SER (WAS) or SEQ ID: 83, and a light chain complementary determining region 3 comprising the amino acid sequence of SEQ ID: 75 or 84.
140. The modified T cell of embodiment 138, wherein the binding domain of the second CAR comprises: (i) a heavy chain complementary determining region 1 comprising the amino acid sequence of SEQ ID: 76, a heavy chain complementary determining region 2 comprising the amino acid sequence of SEQ ID: 77, and a heavy chain complementary determining region 3 comprising the amino acid sequence of SEQ ID: 78; and (ii) a light chain complementary determining region 1 comprising the amino acid sequence of SEQ ID: 73, a light chain complementary determining region 2 comprising the amino acid sequence of TRP-ALA-SER (WAS), and a light chain complementary determining region 3 comprising the amino acid sequence of SEQ ID: 75.
141. The modified T cell of embodiment 138, wherein the binding domain of the second CAR comprises: (i) a heavy chain complementary determining region 1 comprising the amino acid sequence of SEQ ID: 85, a heavy chain complementary determining region 2 comprising the amino acid sequence of SEQ ID: 86, and a heavy chain complementary determining region 3 comprising the amino acid sequence of SEQ ID: 87; and (ii) a light chain complementary determining region 1 comprising the amino acid sequence of SEQ ID: 82, a light chain complementary determining region 2 comprising the amino acid sequence of SEQ ID: 83, and a light chain complementary determining region 3 comprising the amino acid sequence of SEQ ID: 84.
142. The modified T cell of embodiment 138, wherein the binding domain of the first CAR comprises the amino acid sequence of SEQ ID: 5 or 6.
143. The modified T cell of embodiment 138, wherein the binding domain of the second CAR comprises one of the amino acid sequences of SEQ ID: 70-72 and 79-81.
144. The modified T cell of any one of embodiments 138-143, wherein the first CAR comprises the first antigen binding domain, a transmembrane domain, a co-stimulatory domain, and a CD3 zeta domain and/or the second CAR comprises the second antigen binding domain, a transmembrane domain, a co-stimulatory domain, and a CD3 zeta domain.
145. The modified T cell of embodiment 144, wherein the co-stimulatory domain comprises the intracellular domain of a co-stimulatory molecule selected from the group consisting of CD27, CD28, 4-1BB, OX40, CD30, CD40, PD-1, ICOS, lymphocyte function-associated antigen-1 (LFA-1), CD2, CD7, LIGHT, NKG2C, B7-H3, a ligand that specifically binds with CD83, or a combination thereof.
146. The modified T cell of any one of embodiments 138-145, wherein the first CAR and the second CAR are expressed as gene products that are separate polypeptides.
147. The modified T cell of any one of embodiments 138-146, wherein a cytoplasmic domain or a transmembrane domain of the second CAR is modified such that the second CAR is capable of activating the modified T cell via cells expressing CD19 without damaging the cells expressing CD19.
148. A bispecific chimeric antigen receptor, comprising: a first antigen binding domain, a second antigen binding domain, a cytoplasmic domain, and transmembrane domain, wherein the first antigen binding domain recognizes a first antigen, and the second antigen binding domain recognize a second antigen, the first antigen is different from the second antigen.
149. The bispecific chimeric antigen receptor of embodiment 148, wherein the first antigen and the second antigen are not expressed on the same cell.
150. The bispecific chimeric antigen receptor of embodiment 148 or 149, wherein the first antigen is an antigen of a blood component, and the second antigen is an antigen of a solid tumor.
151. The bispecific chimeric antigen receptor of any one of embodiments 148-150, wherein the first antigen is CD19, and the second antigen is a tumor associated MUC1.
152. The bispecific chimeric antigen receptor of any one of embodiments 148-151, wherein the first antigen binding domain comprises one of the amino acid sequences of SEQ ID: 5 and 6.
153. The modified T cell of any one of embodiments 138-147, wherein the second antigen binding domain comprises one of the amino acid sequence of SEQ ID: 70-72 and 79-81.
154. A method of enhancing T cell response in a subject or treating a tumor of the subject, the method comprising: administering an effective amount of modified T cell of any one of embodiments 138-147 to the subject to provide a T-cell response such that the CAR T cell is expanded in the blood of the subject via cells expressing CD19.
155. The modified T cells of any one of embodiments 138-147, wherein the tumor associated MUC1 are expressed on tumor cells and not on corresponding non-malignant cells.
156. The modified T cells of any one of embodiments 138-147, wherein a scFv against the tumor associated MUC1 directly interacts with an o-glycosylated GSTA motif (SEQ ID NO. 88).
157. A cell comprising the bispecific CAR of any one of embodiments 148-152.
158. A nucleic acid encoding the bispecific CAR of any one of embodiments 148-152.
159. A T cell comprising a first CAR and a second CAR, wherein an antigen binding domain of the first CAR binds an antigen selected from the group consisting of CD19, CD33, CD14, and BCMA, and an antigen binding domain of the second CAR binds a tumor associated MUC1.
160. The T cell of embodiment 159, wherein the first CAR comprises the amino acid sequence of SEQ ID NO: 207, and the second CAR comprises the amino acid sequence of SEQ ID: 202.
161. The T cell of embodiment 159, wherein the first CAR comprises the amino acid sequence of SEQ ID NO: 203, 207, 216, or 219, and the second CAR comprises the amino acid sequence of SEQ ID: 202 or 205.
162. The T cell of embodiment 159, wherein the antigen binding domain of the second CAR comprises the amino acid sequence of SEQ ID NO: 70.
163. The T cell of embodiment 159, wherein the antigen binding domain of the second CAR comprises the amino acid sequence of SEQ ID NO: 5 or 6.
164. The T cell of embodiment 159, wherein the Isolated T cell comprises one of the nucleic acid sequences of SEQ ID NO: 201, 204, 206, 208, 215, 217, 218, and 220.
165. The T cell of any one of embodiments 159-164, wherein each of the first CAR and the second CAR comprises an antigen binding domain, a transmembrane domain, and a cytoplasmic domain.
166. The T cell of embodiment 165, wherein the cytoplasmic domain comprises a co-stimulatory domain and a CD3 zeta domain.
167. The T cell of embodiment 166, wherein the co-stimulatory domain comprises the intracellular domain of CD27, CD28, 4-1BB, OX40, CD30, CD40, PD-1, ICOS, lymphocyte function-associated antigen-1 (LFA-1), CD2, CD7, LIGHT, NKG2C, B7-H3, a ligand that specifically binds with CD83, or a combination thereof.
168. The T cell of embodiment 159, wherein the T cell comprises a dominant negative variant of a receptor of programmed death 1 (PD-1), cytotoxic T lymphocyte antigen-4 (CTLA-4), B- and T-lymphocyte attenuator (BTLA), T cell immunoglobulin mucin-3 (TIM-3), lymphocyte-activation protein 3 (LAG-3), T cell immunoreceptor with Ig and ITIM domains (TIGIT), leukocyte-associated immunoglobulin-like receptor 1 (LAIRI), natural killer cell receptor 2B4 (2B4), or CD 160.
169. The T cell of embodiment 159, wherein the T cell comprises a reduced amount of TCR, as compared to the corresponding wide-type T cell.
170. A composition comprising a population of the T cell of any one of embodiments 159-169.
171. A method of enhancing T cell response in a subject or treating a tumor of the subject, the method comprising: administering an effective amount of the T cell of any one of embodiments 159-169.
172. The nucleic acid, the vector, the cell (including T cell and modified T cell), the bispecific CAR, the composition, or the method of any one of embodiments 1-171, wherein the tumor antigen, is a solid tumor antigen.
173. The nucleic acid, the vector, the cell (including T cell and modified T cell), the bispecific CAR, the composition, or the method of any one of embodiments 1-172, wherein the solid tumor antigen is tMUC 1, PRLR, CLCA1, MUC12, GUCY2C, GPR35, CR1L, MUC 17, TMPRSS11B, MUC21, TMPRSS11E, CD207, SLC30A8, CFC1, SLC12A3, SSTR1, GPR27, FZD10, TSHR, SIGLEC15, SLC6A3, KISS1R, QRFPR, GPR119, CLDN6, UPK2, ADAM12, SLC45A3, ACPP, MUC21, MUC16, MS4A12, ALPP, CEA, EphA2, FAP, GPC3, 1L13-Ra2, Mesothelin, PSMA, ROR1, VEGFR-II, GD2, FR-α, ErbB2, EpCAM, EGFRvIII, or EGFR, and wherein the B cell antigen is CD19, CD20, CD22, or BCMA.
174. A method for enhancing T cell expansion and/or cytokine release (e.g., IL-6 and INF-γ) in a subject having cancer, the method comprising: providing a plurality of nucleic acids into T cells, the plurality of nucleic acids encoding a chimeric antigen receptor (CAR) binding a solid tumor antigen and encoding a CAR binding a B cell antigen; and administering an effective amount of the T cells to the subject.
175. A method for enhancing T cell response and/or cytokine release (e.g., IL-6 and INF-γ) in a subject having cancer, the method comprising: providing a plurality of nucleic acids into T cells, the plurality of nucleic acids encoding a chimeric antigen receptor (CAR) binding a solid tumor antigen, a CAR binding a B cell antigen, and a modified PD-1 lacking a functional PD-1 intracellular domain; and administering an effective amount of the T cells to the subject.
176. A modified cell comprising a plurality of nucleic acids encoding a chimeric antigen receptor (CAR) binding a solid tumor antigen associated with tumor of a subject, a CAR binding a B cell antigen, and a modified PD-1 lacking a functional PD-1 intracellular domain.
177. The modified cell or the method of embodiments of 175 or 176, wherein the subject has a higher level of T cell expansion and a higher amount of memory T cells as compared with a subject that is administered an effective amount of the CAR T cells that do not have the CAR binding the B cell antigen nor the modified PD-1.
178. The modified cell or the method of embodiments of 175 or 176, wherein the modified PD-1 comprises one of the amino acid sequences of SEQ ID NO: 89-95.
179. The modified cell or the method of embodiments of any one of embodiments 174-178, wherein the solid tumor antigen is tMUC 1, PRLR, CLCA1, MUC12, GUCY2C, GPR35, CR1L, MUC 17, TMPRSS11B, MUC21, TMPRSS11E, CD207, SLC30A8, CFC1, SLC12A3, SSTR1, GPR27, FZD10, TSHR, SIGLEC15, SLC6A3, KISS1R, QRFPR, GPR119, CLDN6, UPK2, ADAM12, SLC45A3, ACPP, MUC21, MUC16, MS4A12, ALPP, CEA, EphA2, FAP, GPC3, IL13-Ra2, Mesothelin, PSMA, ROR1, VEGFR-II, GD2, FR-α, ErbB2, EpCAM, EGFRvIII, or EGFR, and the B cell antigen is CD19, CD20, CD22, or BCMA.
180. The modified cell or the method of embodiments of any one of embodiments 174-178, wherein the B cell antigen comprises CD19.
181. The modified cell or the method of embodiment 180, wherein the solid tumor antigen comprises tumor associated MUC1.
182. The modified cell or the method of embodiment 181, wherein a binding domain of the CAR binding the B cell antigen comprises an amino acid sequence of SEQ ID NO: 5 or 6, and a binding domain of the CAR binding the solid tumor antigen comprises an amino acid sequence of SEQ ID NO: 70.
183. The modified cell or the method of embodiment 181, wherein the CAR binding the B cell antigen comprises an amino acid sequence of SEQ ID NO: 207, and the CAR binding the solid tumor antigen comprises an amino acid sequence of SEQ ID NO: 202.
184. The modified cell or the method of embodiment 181, wherein the CAR binding the B cell antigen comprises an antigen binding domain, a transmembrane domain, a cytoplasmic domain, and the CAR binding the solid tumor antigen comprises an antigen binding domain, a transmembrane domain, and a cytoplasmic domain.
185. The modified cell or the method of embodiment 184, wherein the cytoplasmic domain of the CAR comprises a co-stimulatory domain or a CD3 zeta domain, or a combination thereof.
186. The modified cell or the method of embodiment 180, wherein the T cell expansion is greater than a T cell expansion obtained by administering T cells having the CAR binding the solid tumor antigen in the absence of the CAR binding the B cell antigen.
187. The modified cell or the method of embodiment 186, wherein the T cell expansion is measured based on an increase in copy number of CAR molecules in genomic DNA of the T cells.
188. The modified cell or the method of embodiment 180, wherein at least one of the nucleic acids comprises a nucleic acid sequence of SEQ ID NO: 201.
189. The modified cell or the method of embodiment 178, wherein the B cell antigen comprises CD19, CD20, CD22, or BCMA.
190. The modified cell or the method of embodiment 188, wherein the solid tumor antigen comprises B7, CAIX, CD123, CD133, CD171, CD171/L1-CAM, CEA, Claudin 18.2, cMet, CS1, CSPG4, Dectin1, EGFR, EGFR vIII, EphA2, ERBB receptors, ErbB T4, ERBB2, FAP, Folate receptor 1, FITC, Folate receptor 1, FSH, GD2, GPC3, HA-1 H/HLA-A2, HER2, IL-11Ra, IL13 receptor a2, IL13R, IL13Rα2 (zetakine), Kappa, Leukemia, LewisY, Mesothelin, MUC1, NKG2D, NY-ESO-1, PSMA, ROR-1, TRAIL-receptor1, or VEGFR2.
191. The modified cell or the method of embodiment 178, wherein the CAR binding the B cell antigen comprises an amino acid sequence of SEQ ID NO: 203, 207, 216, or 219.
192. The modified cell or the method of embodiment 178, wherein the CAR binding the solid tumor antigen comprises an amino acid sequence of SEQ ID NO: 202 or 205.
193. The modified cell or the method of embodiment 178, wherein at least one of nucleic acids comprises a nucleic acid sequence of SEQ ID NO: 201, 204, 206, 208, 215, 217, 218, or 220.
194. A method for increasing a number or ratio of an immune cell subpopulation and/or increasing or extending persistence of the immune cell subpopulation in a subject having cancer, the method comprising: administering an effective amount of a composition comprising T-cells to the subject, the T-cells including a chimeric antigen receptor (CAR) and a modified PD-1, the modified PD-1 lacking a functional PD-1 intracellular domain; and monitoring T-cell response in the subject, the immune cell subpopulation comprising naive T-cells, stem cell memory T-cells, and/or central memory T-cells, wherein the number or ratio of the immune cell subpopulation in the subject is increased as compared to corresponding T-cells that do not include the modified PD-1; or monitoring the persistence of the immune cell subpopulation in the subject, whether it is increased or extended as compared to the corresponding T-cells that do not include the modified PD-1.
195. The method of claim 194, wherein monitoring the T-cell response in the subject comprises at least one of: detecting mRNA of the modified PD-1; detecting a number of one or more white blood cells; detecting a number of at least one of naive T-cells, stem cell memory T-cells, and central memory T-cells; detecting a CAR copy number; detecting CD3 positive cell number; detecting a number of T-cells expressing CAR; and detecting a level of one or more cytokines.
196. The method of claim 194, wherein the T-cells has more memory T-cells in the subject than those of T-cells that are introduced with the CAR and do not include the modified PD-1.
197. The method of claim 194, wherein the modified PD-1 comprises one sequences of SEQ ID: 89-93 or the modified PD-1 do not include SEQ ID: 94 or 95.
198. The method of claim 194, wherein the T-cells comprise a dominant negative variant of PD-1, and endogenous gene of PD-1 of the T cells is not disrupted.
199. The method of claim 194, wherein the CAR comprises an extracellular domain, a transmembrane domain, and an intracellular domain, the extracellular domain binds an antigen.
200. The method of claim 199, wherein the intracellular domain comprises a co-stimulatory domain that comprises an intracellular domain of a costimulatory molecule selected from the group consisting of CD27, CD28, 4-1BB, OX40, CD30, CD40, PD-1, ICOS, lymphocyte function-associated antigen-1 (LFA-1), CD2, CD7, LIGHT, NKG2C, B7-H3, and any combination thereof.
201. The method of claim 199, wherein the antigen is Epidermal growth factor receptor (EGFR), Variant III of the epidermal growth factor receptor (EGFRvIII), Human epidermal growth factor receptor 2 (HER2), Mesothelin (MSLN), Prostate-specific membrane antigen (PSMA), Carcinoembryonic antigen (CEA), Disialoganglioside 2 (GD2), Interleukin-13Ra2 (IL13Rα2), Glypican-3 (GPC3), Carbonic anhydrase IX (CAIX), L1 cell adhesion molecule (L1-CAM), Cancer antigen 125 (CA125), Cluster of differentiation 133 (CD133), Fibroblast activation protein (FAP), Cancer/testis antigen 1B (CTAG1B), Mucin 1 (MUC1), Folate receptor-α (FR-α), CD19, FZD10, TSHR, PRLR, Muc 17, GUCY2C, CD207, CD3, CD5, B-Cell Maturation Antigen (BCMA), or CD4.
202. The method of claim 194, wherein the T-cells comprise a CAR binding a solid tumor antigen and a CAR binding a white cell antigen.
203. The method of claim 202, wherein the the solid tumor antigen is tMUC 1, PRLR, CLCA1, MUC12, GUCY2C, GPR35, CR1L, MUC 17, TMPRSS11B, MUC21, TMPRSS11E, CD207, SLC30A8, CFC1, SLC12A3, SSTR1, GPR27, FZD10, TSHR, SIGLEC15, SLC6A3, KISS1R, QRFPR, GPR119, CLDN6, UPK2, ADAM12, SLC45A3, ACPP, MUC21, MUC16, MS4A12, ALPP, CEA, EphA2, FAP, GPC3, IL13-Ra2, Mesothelin, PSMA, ROR1, VEGFR-II, GD2, FR-α, ErbB2, EpCAM, EGFRvIII, or EGFR, and the B cell antigen is CD19, CD20, CD22, or BCMA.
204. The method of claim 202, wherein the white cell antigen is a B cell antigen.
205. The method of claim 202, wherein the B cell antigen is CD19, CD20, CD22, or BCMA.
206. A method for increasing a number or ratio of an immune cell subpopulation and/or increasing or extending persistence of the immune cell subpopulation, the method comprising: providing T-cells with a nucleic acid sequence encoding a chimeric antigen receptor (CAR); and providing T-cells with a nucleic acid sequence encoding a modified PD-1, the modified PD-1 lacking a functional PD-1 intracellular domain, the immune cell subpopulation comprising naive T-cells, stem cell memory T-cells, and/or central memory T-cells, wherein the number or ratio of the immune cell subpopulation is increased as compared to corresponding T-cells that do not include the modified PD-1; or monitoring the persistence of the immune cell subpopulation, whether it is increased or extended as compared to the corresponding T-cells that do not include the modified PD-1.
207. An isolated zinc finger nuclease (ZFN) comprising: a first zinc finger protein (ZFP) binding to a first target site in a CTLA4 gene, the first ZFP comprising three or more zinc finger domains; a second ZFP binding to a second target site in the CTLA4 gene, the second ZFP comprising three or more zinc finger domains; and a cleavage domain, wherein the first ZFP comprises amino acid sequences SEQ ID NOS.: 301, 302, and 303 ordered from a N-terminal of the first ZFP to a C-terminal of the first ZFP, and the second ZFP comprises amino acid sequences SEQ ID NOS.: 305, 306, and 307 ordered from a N-terminal of the second ZFP to a C-terminal of the second ZFP.
208. An isolated ZFN that binds a target site in a CTLA4 gene, the target site comprising a nucleotide sequence SEQ ID NO.: 304.
209. An isolated zinc finger nuclease (ZFN) comprising: a first zinc finger protein (ZFP) binding to a first target site in a LAG3 gene, the first ZFP comprising three or more zinc finger domains; a second ZFP binding to a second target site in the LAG3 gene, the second ZFP comprising three or more zinc finger domains; and a cleavage domain, wherein: the first ZFP comprises amino acid sequences SEQ ID NOS.: 308, 309, and 310 ordered from a N-terminal of the first ZFP to a C-terminal of the first ZFP, and the second ZFP comprises amino acid sequences SEQ ID NOS.: 309, 308, and 312 ordered from a N-terminal of the second ZFP to a C-terminal of the second ZFP, or the first ZFP comprises amino acid sequences SEQ ID NOS.: 313, 314, and 315 ordered from a N-terminal of the first ZFP to a C-terminal of the first ZFP, and the second ZFP comprises amino acid sequences SEQ ID NOS.: 316, 317, and 318 ordered from a N-terminal of the second ZFP to a C-terminal of the second ZFP.
210. An isolated ZFN that binds a target site in a LAG3 gene, the target site comprising a nucleotide sequence SEQ ID NO.: 311 or 319.
211. An isolated zinc finger nuclease (ZFN) comprising: a first zinc finger protein (ZFP) binding to a first target site in a BTLA gene, the first ZFP comprising three or more zinc finger domains; a second ZFP binding to a second target site in the BTLA gene, the second ZFP comprising three or more zinc finger domains; and a cleavage domain, wherein the first ZFP comprises amino acid sequences SEQ ID NOS.: 320, 321, and 322 ordered from a N-terminal of the first ZFP to a C-terminal of the first ZFP, and the second ZFP comprises amino acid sequences SEQ ID NOS.: 323, 324, and 325 ordered from a N-terminal of the second ZFP to a C-terminal of the second ZFP.
212. An isolated ZFN that binds a target site in a BTLA gene, the target site comprising a nucleotide sequence SEQ ID NO.: 326.
213. An isolated zinc finger nuclease (ZFN) comprising: a first zinc finger protein (ZFP) binding to a first target site in a TIM3 gene, the first ZFP comprising three or more zinc finger domains; a second ZFP binding to a second target site in the TIM3 gene, the second ZFP comprising three or more zinc finger domains; and a cleavage domain, wherein: the first ZFP comprises amino acid sequences SEQ ID NOS.: 327, 328, and 329 ordered from a N-terminal of the first ZFP to a C-terminal of the first ZFP, and the second ZFP comprises amino acid sequences SEQ ID NOS.: 330, 331, and 332 ordered from a N-terminal of the second ZFP to a C-terminal of the second ZFP; or the first ZFP comprises amino acid sequences SEQ ID NOS.: 334, 335, and 336 ordered from a N-terminal of the first ZFP to a C-terminal of the first ZFP, and the second ZFP comprises amino acid sequences SEQ ID NOS.: 337, 338, and 339 ordered from a N-terminal of the second ZFP to a C-terminal of the second ZFP.
214. An isolated ZFN that binds a target site in a TIM3 gene, the target site comprising a nucleotide sequence SEQ ID NO.: 333 or 340.
215. An isolated zinc finger nuclease (ZFN) comprising: a first zinc finger protein (ZFP) binding to a first target site in a FOXP3 gene, the first ZFP comprising three or more zinc finger domains; a second ZFP binding to a second target site in the FOXP3 gene, the second ZFP comprising three or more zinc finger domains; and a cleavage domain, wherein: the first ZFP comprises amino acid sequences SEQ ID NOS.: 341, 328, and 342 ordered from a N-terminal of the first ZFP to a C-terminal of the first ZFP, and the second ZFP comprises amino acid sequences SEQ ID NOS.: 343, 344, and 345 ordered from a N-terminal of the second ZFP to a C-terminal of the second ZFP, the first ZFP comprises amino acid sequences SEQ ID NOS.: 347, 348, and 349 ordered from a N-terminal of the first ZFP to a C-terminal of the first ZFP, and the second ZFP comprises amino acid sequences SEQ ID NOS.: 350, 344, and 351 ordered from a N-terminal of the second ZFP to a C-terminal of the second ZFP; or the first ZFP comprises amino acid sequences SEQ ID NOS.: 288, 310, and 314 ordered from a N-terminal of the first ZFP to a C-terminal of the first ZFP, and the second ZFP comprises amino acid sequences SEQ ID NOS.: 308, 308, and 284 ordered from a N-terminal of the second ZFP to a C-terminal of the second ZFP.
216. An isolated ZFN that binds a target site in a FOXP3 gene, the target site comprising a nucleotide sequence SEQ ID NO.: 346, 352, or 283.
217. An isolated zinc finger nuclease (ZFN) comprising: a first zinc finger protein (ZFP) binding to a first target site in a SIVA1 gene, the first ZFP comprising three or more zinc finger domains; a second ZFP binding to a second target site in the SIVA1 gene, the second ZFP comprising three or more zinc finger domains; and a cleavage domain, wherein: the first ZFP comprises amino acid sequences SEQ ID NOS.: 353, 331, and 354 ordered from a N-terminal of the first ZFP to a C-terminal of the first ZFP, and the second ZFP comprises amino acid sequences SEQ ID NOS.: 355, 300, and 299 ordered from a N-terminal of the second ZFP to a C-terminal of the second ZFP; or the first ZFP comprises amino acid sequences SEQ ID NOS.: 308, 314, and 312 ordered from a N-terminal of the first ZFP to a C-terminal of the first ZFP, and the second ZFP comprises amino acid sequences SEQ ID NOS.: 288, 287, and 286 ordered from a N-terminal of the second ZFP to a C-terminal of the second ZFP.
218. An isolated ZFN that binds a target site in a SIVA1 gene, the target site comprising a nucleotide sequence SEQ ID NO.: 296 or 285.
219. An isolated zinc finger nuclease (ZFN) comprising: a first zinc finger protein (ZFP) binding a first target site in a LGALS9 gene, the first ZFP comprising three or more zinc finger domains; a second ZFP binding to a second target site in the LGALS9 gene, the second ZFP comprising three or more zinc finger domains; and a cleavage domain, wherein the first ZFP comprises amino acid sequences SEQ ID NOS.: 298, 324, and 297 ordered from a N-terminal of the first ZFP to a C-terminal of the first ZFP, and the second ZFP comprises amino acid sequences SEQ ID NOS.: 295, 300, and 294 ordered from a N-terminal of the second ZFP to a C-terminal of the second ZFP.
220. An isolated ZFN that binds a target site in a CD33 gene, the target site comprising a nucleotide sequence SEQ ID NO.: 293.
221. An isolated zinc finger nuclease (ZFN) comprising: a first zinc finger protein (ZFP) binding to a first target site in a CD33 gene, the first ZFP comprising three or more zinc finger domains; a second ZFP binding to a second target site in the CD33 gene, the second ZFP comprising three or more zinc finger domains; and a cleavage domain, wherein the first ZFP comprises amino acid sequences SEQ ID NOS.: 301, 292, and 312 ordered from a N-terminal of the first ZFP to a C-terminal of the first ZFP, and the second ZFP comprises amino acid sequences SEQ ID NOS.: 291, 290, and 310 ordered from a N-terminal of the second ZFP to a C-terminal of the second ZFP.
222. An isolated ZFN that binds a target site in a LGALS9 gene, the target site comprising a nucleotide sequence SEQ ID NO.: 289.
223. The isolated ZFN of any one of embodiments 207-222, wherein the gene is a human gene.
224. The isolated ZFN of any one of embodiments 207-222, wherein the cleavage domain comprises a wild-type or engineered Fokl cleavage domain.
225. A polynucleotide encoding the isolated ZFN of any one of embodiments 207-222.
226. A vector comprising the polynucleotide of embodiment 225.
227. The vector of embodiment 226, wherein the vector is an adenoviral or lentiviral vector.
228. An isolated cell or a cell line comprising the isolated ZFN of any one of embodiments 207-222.
229. The isolated cell or the cell line of embodiment 228, wherein the isolated cell is a stem cell, a T cell or a Natural Killer (NK) cell.
230. The isolated cell or the cell line of embodiment 228, wherein the cell is a T cell derived from a primary human T cell isolated from a human donor.
231. The isolated cell or the cell line of embodiment 228, wherein the cell has a reduced expression of an endogenous gene of CTLA4, LAG3, BTLA, TIM3, FOXP3, SIVA1, and LGALS9.
232. An isolated cell comprising isolated nucleic acid sequence encoding a chimeric antigen receptor (CAR), wherein an endogenous gene is inactivated using the ZFN of any one of embodiments 207-222.
233. The isolated cell or the cell line of embodiment 232, wherein the CAR comprises an antigen binding domain, a transmembrane domain, a co-stimulatory domain, and a CD3 zeta signaling domain.
234. The isolated cell or the cell line of embodiment 233, wherein the cell has a reduced graft-versus-host disease (GVHD) response in a bioincompatible human recipient as compared to the GVHD response of the primary human T cell.
235. The isolated cell or the cell line of embodiment 232, wherein an antigen binding domain of the CAR binds FZD10, TSHR, PRLR, Muc17, GUCY2C, CD207, CD19, or CD20.
236. The isolated cell or the cell line of embodiment 232, wherein a co-stimulatory domain of the CAR comprises the intracellular domain of a costimulatory molecule selected from the group consisting of CD27, CD28, 4-1BB, OX40, CD30, CD40, PD-1, ICOS, lymphocyte function-associated antigen-1 (LFA-1), CD2, CD7, LIGHT, NKG2C, B7-H3, and any combination thereof.
237. The isolated cell or the cell line of embodiment 228, wherein the isolated cell or the cell line is a T cell comprising a nucleic acid sequence encoding hTERT or a nucleic acid encoding SV40LT, or a combination thereof.
238. The isolated cell or the cell line of embodiment 237, wherein the T cell comprises a nucleic acid sequence encoding hTERT and a nucleic acid encoding SV40LT.
239. The isolated cell or the cell line of embodiment 237, wherein expression of hTERT is regulated by an inducible expression system.
240. The isolated cell or the cell line of embodiment 237, wherein expression of SV40LT gene is regulated by an inducible expression system.
241. The isolated cell or the cell line of embodiment 240, wherein the inducible expression system is rTTA-TRE, which increases or activates the expression of SV40LT gene or hTERT gene, or a combination thereof.
242. The isolated cell or the cell line of embodiment 237, wherein the T cell comprises a nucleic acid sequence encoding a suicide gene, and/or the suicide gene comprises a HSV-TK suicide gene system.
243. A method of treating cancer in a subject, the method comprising administering a genetically modified cell of embodiment 232 to the subject, wherein the cancer is selected from the group consisting of a lung carcinoma, pancreatic cancer, liver cancer, bone cancer, breast cancer, colorectal cancer, leukemia, ovarian cancer, lymphoma, and brain cancer.
244. An isolated zinc finger nuclease (ZFN) comprising: a first zinc finger protein (ZFP) binding to a first target site in a B2M gene, the first ZFP comprising three or more zinc finger domains; a second ZFP binding to a second target site in the B2M gene, the second ZFP comprising three or more zinc finger domains; and a cleavage domain, wherein the first ZFP comprises amino acid sequences listed in Table 8, and the second ZFP comprises amino acid sequences listed in Table 8.
245. An isolated ZFN that binds a target site in a B2M gene, the target site comprising a nucleotide sequence listed in Table 8.
246. An isolated zinc finger nuclease (ZFN) comprising: a first zinc finger protein (ZFP) binding to a first target site in a CIITA gene, the first ZFP comprising three or more zinc finger domains; a second ZFP binding to a second target site in the CIITA gene, the second ZFP comprising three or more zinc finger domains; and a cleavage domain, wherein: the first and second ZFP comprises amino acid sequences listed in Table 8.
247. The isolated ZFN of any one of embodiments 244-246, wherein the gene is a human gene.
248. The isolated ZFN of any one of embodiments 244-246, wherein the cleavage domain comprises a wild-type or engineered Fokl cleavage domain.
249. A polynucleotide encoding the isolated ZFN of any one of embodiments 244-248.
250. A vector comprising the polynucleotide of embodiments 249.
251. The vector of embodiments 250, wherein the vector is an adenoviral or lentiviral vector.
252. An isolated cell or a cell line comprising the isolated ZFN of any one of embodiments 244-248.
253. The isolated cell or the cell line of embodiments 252, wherein the isolated cell is a stem cell, a T cell or a Natural Killer (NK) cell.
254. The isolated cell or the cell line of embodiments 253, wherein the cell is a T cell derived from a primary human T cell isolated from a human donor.
255. The isolated cell or the cell line of embodiments 254, wherein the cell has a reduced expression of an endogenous gene of B2M or CIITA.
256. An isolated cell comprising isolated nucleic acid sequence encoding a chimeric antigen receptor (CAR), wherein an endogenous gene of the CAR is inactivated using the ZFN of any one of embodiments 244-256.
257. The isolated cell or the cell line of embodiments 256, wherein the CAR comprises an antigen binding domain, a transmembrane domain, a co-stimulatory domain, and a CD3 zeta signaling domain.
258. The isolated cell or the cell line of embodiments 257, wherein the cell has a reduced host-versus-graft disease (HVGD) response in a bioincompatible human recipient as compared to the HVGD response of the primary human T cell.
259. The isolated cell or the cell line of embodiments 258, wherein an antigen binding domain of the CAR binds FZD10, TSHR, PRLR, Muc17, GUCY2C, CD207, CD19, or CD20.
260. The isolated cell or the cell line of embodiments 258, wherein a co-stimulatory domain of the CAR comprises the intracellular domain of a costimulatory molecule selected from the group consisting of CD27, CD28, 4-1BB, OX40, CD30, CD40, PD-1, ICOS, lymphocyte function-associated antigen-1 (LFA-1), CD2, CD7, LIGHT, NKG2C, B7-H3, and any combination thereof.
261. The isolated cell or the cell line of embodiments 260, wherein the isolated cell or the cell line is a T cell comprising a nucleic acid sequence encoding hTERT or a nucleic acid encoding SV40LT, or a combination thereof.
262. The isolated cell or the cell line of embodiments 261, wherein the T cell comprises a nucleic acid sequence encoding hTERT and a nucleic acid encoding SV40LT.
263. The isolated cell or the cell line of embodiments 262, wherein expression of hTERT is regulated by an inducible expression system.
264. The isolated cell or the cell line of embodiments 262, wherein expression of SV40LT gene is regulated by an inducible expression system.
265. The isolated cell or the cell line of embodiments 264, wherein the inducible expression system is rTTA-TRE, which increases or activates the expression of SV40LT gene or hTERT gene, or a combination thereof.
266. The isolated cell or the cell line of embodiment 262, wherein the T cell comprises a nucleic acid sequence encoding a suicide gene, and/or the suicide gene comprises a HSV-TK suicide gene system.
267. A method of treating cancer in a subject, the method comprising administering a genetically modified cell of embodiment 25 to the subject, wherein the cancer is selected from the group consisting of lung carcinoma, pancreatic cancer, liver cancer, bone cancer, breast cancer, colorectal cancer, leukemia, ovarian cancer, lymphoma, and brain cancer.
268. A modified cell comprising a reduced amount of Major Histcompatibility Complex II (MHC II) as compared to a corresponding wild-type cell, wherein the modified cell has decreased immunogenicity as compared to the corresponding wild-type cell.
269. A method for generating modified cells for transplantation, comprising culturing in a culture media modified cells that have a reduced amount of Major Histcompatibility Complex II (MHC II) as compared to corresponding wild-type cells, wherein the modified cells have decreased immunogenicity as compared to the corresponding wild-type cells.
270. A method for treating a condition, comprising administering to a subject a therapeutically effective amount of modified cells that have a reduced amount of Major Histcompatibility Complex II (MHC II) as compared to corresponding wild-type cells, wherein the modified cells have decreased immunogenicity as compared to the corresponding wild-type cells.
271. The modified cell of any one of embodiments 268-270, wherein the modified cell has reduced expression of one or more genes of a biosynthesis or transportation pathway of MHC 11 as compared to the corresponding wild-type cell.
272. The modified cell of any one of embodiments 268-270, wherein the modified cell accumulates a reduced amount of MHC 11 on the modified cell as compared to the corresponding wild-type cell.
273. The modified cell of any one of embodiments 268-270, wherein the modified cell has a disruption in an endogenous gene associated with a biosynthesis or transportation pathway of MHC II.
274. The modified cell of any one of embodiments 268-270, wherein the disruption comprises a disruption of MHC class II transactivator (CIITA).
275. The modified cell of any one of embodiments 268-270, wherein the disruption results from deletion of at least a portion of CIITA.
276. The modified cell of any one of embodiments 268-270 the MHC 11 comprises Human Leukocyte antigen 11 (HLA II).
277. The modified cell of any one of embodiments 268-270, wherein the decreased immunogenicity comprises a deceased level of inflammatory responses induced by the modified cell as compared to the corresponding wild-type cell.
278. A modified cell comprising a reduced amount of Major Histocompatibility Complex I (MHC 1) as compared to a corresponding wild-type cell, wherein the modified cell has decreased immunogenicity as compared to the corresponding wild-type cell.
279. The modified cell of embodiment 278, wherein the modified cell has a disruption in an endogenous gene associated with a biosynthesis or transportation pathway of MHC 1.
280. The modified cell of embodiment 279, wherein the disruption comprises a disruption of one or more exons of Transporter associated with antigen presentation 1 (TAP1) gene or a disruption of one or more exons of TAP-associated glycoprotein (TAPBP) gene.
281. The modified cell of embodiment 280, wherein the disruption of the one or more exons of TAP1 gene comprises a disruption of an exon of TAP1 gene.
282. The modified cell of embodiment 280, wherein the disruption of TAPBP gene comprises a heterozygous disruption of TAP1 gene, and the modified cell expresses a wild-type TAPBP gene.
283. The modified cell of embodiment 280, wherein the disruption of the one or more exons of TAPBP gene comprises a disruption of an exon of TAPBP gene.
284. The modified cell of embodiment 280, wherein the decreased immunogenicity comprises a decreased level of inflammatory responses induced by the modified cell as compared to the corresponding wild-type cell.
285. The modified cell of embodiment 280, wherein a karyotype of the modified cell is the same as a karyotype of the corresponding wild-type cell.
286. The modified cell of embodiment 280, wherein a level of pluripotency of the modified cell is substantially the same as a level of pluripotency of the corresponding wild-type cell.
287. The modified cell of any one of embodiments 268-286, wherein the cell is a T cell or a NK cell.
288. The modified cell of any one of embodiments 268-286, wherein the modified cell comprises a CAR.
289. The modified cell of embodiment 288, wherein the CAR comprises an extracellular domain, a transmembrane domain, and an intracellular domain, and the extracellular domain binds a tumor antigen.
290. The modified cell of embodiment 289, wherein the tumor antigen includes HER2, CD19, CD20, CD22, Kappa or light chain, CD30, CD33, CD123, CD38, ROR1, ErbB3/4, EGFR, EGFRvIII, EphA2, FAP, carcinoembryonic antigen, EGP2, EGP40, mesothelin, TAG72, PSMA, NKG2D ligands, B7-H6, IL-13 receptor a 2, IL-11 receptor a, MUC1, MUC16, CA9, GD2, GD3, HMW-MAA, CD171, Lewis Y, G250/CAIX, HLA-A1 MAGE A1, HLA-A2 NY-ESO-1, PSC1, folate receptor-α, CD44v7/8, 8H9, NCAM, VEGF receptors, 5T4, Fetal AchR, NKG2D ligands, CD44v6, TEM1, or TEM8.
291. The modified cell of embodiment 289, wherein the intracellular domain comprising a co-stimulatory domain that comprises an intracellular domain of a costimulatory molecule selected from the group consisting of CD27, CD28, 4-1BB, OX40, CD30, CD40, PD-1, ICOS, lymphocyte function-associated antigen-1 (LFA-1), CD2, CD7, LIGHT, NKG2C, B7-H3, and any combination thereof.
292. The modified cell of embodiments 289, wherein the intracellular domain comprises a CD3 zeta signaling domain.
293. A method for improving infusion of cells or cells derived from the cells, the method comprising: culturing in a culture media the modified cells of the embodiments 246; and administering a subject a composition comprising the modified cells, wherein immune responses of the subject in response to the infusion is less than infusion using wild type cells.
294. The method of embodiments 293, wherein the infusion is an allogeneic infusion.
295. A modified human T cell comprising: a nucleic acid sequence encoding a CAR; a disruption of TCR gene; a disruption of MHC class II transactivator (CIITA) gene; and a disruption of Transporter associated with antigen presentation 1 (TAP1) gene or a disruption of TAP-associated glycoprotein (TAPBP) gene, wherein the modified human T cell has: a reduced amount of TCR, a reduced amount of MHC 1, or a reduced amount of MHC 11, as compared to human T cells without the disruption; or a reduced host-versus-graft disease (HVGD) response in a bioincompatible human recipient as compared to the HVGD response of the primary human T cell.
296. The modified cell of embodiments 295, wherein the CAR comprises an extracellular domain, a transmembrane domain, and an intracellular domain, and the extracellular domain binds a tumor antigen.
297. The modified cell of embodiments 296, wherein the tumor antigen includes HER2, CD19, CD20, CD22, Kappa or light chain, CD30, CD33, CD123, CD38, ROR1, ErbB3/4, EGFR, EGFRvIII, EphA2, FAP, carcinoembryonic antigen, EGP2, EGP40, mesothelin, TAG72, PSMA, NKG2D ligands, B7-H6, IL-13 receptor a 2, IL-11 receptor a, MUC1, MUC16, CA9, GD2, GD3, HMW-MAA, CD171, Lewis Y, G250/CAIX, HLA-A1 MAGE A1, HLA-A2 NY-ESO-1, PSC1, folate receptor-α, CD44v7/8, 8H9, NCAM, VEGF receptors, 5T4, Fetal AchR, NKG2D ligands, CD44v6, TEM1, or TEM8.
298. The modified cell of embodiments 296, wherein the intracellular domain comprises a co-stimulatory domain that comprises an intracellular domain of a costimulatory molecule selected from the group consisting of CD27, CD28, 4-1BB, OX40, CD30, CD40, PD-1, ICOS, lymphocyte function-associated antigen-1 (LFA-1), CD2, CD7, LIGHT, NKG2C, B7-H3, and any combination thereof.
299. The modified cell of embodiments 296, wherein the intracellular domain comprises a CD3 zeta signaling domain.
300. A method of modifying a target genomic locus in a lymphocyte, the method comprising: introducing into the lymphocyte a nuclease agent that make a single or double-strand break within the target genomic locus; and selecting the lymphocyte of which endogenous B2M, CIITA, TAP1, and/or TAPBP genes are disrupted.
301. A genetically modified lymphocyte comprising a nuclease agent targeting endogenous B2M, CIITA, TAP1, and/or TAPBP genes.
302. The method or the genetically modified lymphocyte of any one of embodiments 300-301, wherein the nuclease agent is a zinc finger nuclease (ZFN), a Transcription Activator-Like Effector Nuclease (TALEN), or a meganuclease.
303. The method or the genetically modified lymphocyte of any one of embodiments 300-301, wherein the nuclease agent comprises a Clustered Regularly Interspaced Short Palindromic Repeats (CRISPR)-associated (Cas) protein and a guide RNA (gRNA).
304. The method of embodiments 303, wherein the Cas protein is Cas9.
305. The method or the genetically modified lymphocyte of any one of embodiments 300-301, wherein the nuclease agent comprising at least one of the amino acid sequence listed in Tables 9-10.
306. The method or the genetically modified lymphocyte of one of embodiments 300-301, wherein the nuclease agent comprises: one or more ZFNs targeting one or more exons of Transporter associated with antigen presentation 1 (TAP1) gene or a disruption of one or more exons of TAP-associated glycoprotein (TAPBP) gene, or an exon of TAP1 gene, or the isolated ZFN of any one of embodiments 1-4.
307. The genetically modified lymphocyte or the method of any one of embodiments 300-306, wherein the lymphocyte is NK cell or T cell.
308. The genetically modified lymphocyte or the method of any one of embodiments 300-306, wherein the genetically modified cell elicits a reduced graft versus host disease response against allogeneic cells as compared to a corresponding cell that does not include nucleic acid sequence.
309. The genetically modified lymphocyte or the method of any one of embodiments 300-306, wherein the lymphocyte is a T cell derived from a primary human T cell isolated from a human donor.
310. The genetically modified lymphocyte or the method of any one of embodiments 300-306, wherein the T cell comprises a CAR.
311. The genetically modified lymphocyte or the method of embodiment 310, wherein the CAR comprises an extracellular domain, a transmembrane domain, and an intracellular domain, and the extracellular domain binds a tumor antigen.
312. The genetically modified lymphocyte or the method of embodiment 311, wherein the tumor antigen includes HER2, CD19, CD20, CD22, Kappa or light chain, CD30, CD33, CD123, CD38, ROR1, ErbB3/4, EGFR, EGFRvIII, EphA2, FAP, carcinoembryonic antigen, EGP2, EGP40, mesothelin, TAG72, PSMA, NKG2D ligands, B7-H6, IL-13 receptor a 2, IL-11 receptor a, MUC1, MUC16, CA9, GD2, GD3, HMW-MAA, CD171, Lewis Y, G250/CAIX, HLA-A1 MAGE A1, HLA-A2 NY-ESO-1, PSC1, folate receptor-α, CD44v7/8, 8H9, NCAM, VEGF receptors, 5T4, Fetal AchR, NKG2D ligands, CD44v6, TEM1, or TEM8.
313. The genetically modified lymphocyte or the method of embodiment 311, wherein the intracellular domain comprising a co-stimulatory domain that comprises an intracellular domain of a costimulatory molecule selected from the group consisting of CD27, CD28, 4-1BB, OX40, CD30, CD40, PD-1, ICOS, lymphocyte function-associated antigen-1 (LFA-1), CD2, CD7, LIGHT, NKG2C, B7-H3, and any combination thereof.
314. The genetically modified lymphocyte or the method of embodiments 311, wherein the intracellular domain comprises a CD3 zeta signaling domain.
315. The genetically modified lymphocyte or the method of any one of embodiments 300-306, wherein the T cell comprises a modified T Cell Receptor (TCR).
316. The genetically modified lymphocyte or the method of 315, wherein the TCR is derived from spontaneously occurring tumor-specific T cells in patients.
317. The genetically modified lymphocyte or the method of 315, wherein the TCR binds a tumor antigen.
318. The genetically modified lymphocyte or the method of 317, wherein the tumor antigen comprises CEA, gp100, MART-1, p53, MAGE-A3, or NY-ESO-1.
319. The genetically modified lymphocyte or the method of 317, wherein the TCR comprises TCRγ and TCRδ Chains or TCRα and TCR chains, or a combination thereof.
320. A method of causing a T-cell response in a subject or treating a tumor of the subject, the method comprising: administering an effective amount of the T cell of any one of embodiments 301-319.
321. A method of determining the efficacy of a CAR T cell therapy, wherein the method comprises administering the nucleic acid, the cells, the composition, the modified T cell, or the bispecific CAR of any one of embodiments 1-6, 14-43, 45, and 46 to a subject in need thereof and measuring the levels of cytokine release over a period of time after introducing the CAR T cell to a subject.
322. A method of monitoring the efficacy of a CAR T cell therapy, wherein the method comprises administering the nucleic acid, the cells, or the composition of any one of embodiments 1-6 and 14-27 to a subject in need thereof and measuring the levels of cytokine release over a period of time after introducing the CAR T cell to a subject.
323. The method of embodiment 321 or 322, wherein the method further comprises comparing the level of cytokine release with control subject and wherein the control subject comprises a subject that is not introduced with CAR T cell therapy or a subject that is administered with T cells comprising a single CAR molecule (e.g., anti-solid tumor CAR).
324. The method of any one of embodiments 321-323, wherein the cytokine is IL-6, IFN-γ, or a combination thereof.
325. The method of any one of embodiments 321-324, wherein the method comprises measuring cytokine release from day 0 (one day before introducing CAR T cell therapy) to day 10, to day 9, to day 8, to day 7, to day 6, to day 5, to day 4, to day 3, to day 2, or to day 1 of CAR T cell therapy.
326. The method of any one of embodiments 321-325, wherein the subject has thyroid cancer, cholangiocarcinoma, breast cancer, or pancreatic cancer.
327. The method of any one of embodiments 321-326, wherein the subject is a mammal.
328. The method of any one of embodiments 321-327, wherein the mammal is a human.

### EXAMPLES

### Example 1. Expression of CARs on T Cells

[0204] Lentiviral vectors that encode a CD19 CAR (CAR: SEQ ID NO. 207 and scFv: SEQ ID NO. 6) and tumor associated MUC1 CAR (CAR: SEQ ID NO. 202 and scFv: SEQ ID NO. 70) were generated, as shown in FIG. 1 (see “Chimeric Receptors Containing CD137 Signal Transduction Domains Mediate Enhanced Survival of T Cells and Increased Antileukemic Efficacy In Vivo,” Molecular Therapy, August 2009, vol. 17 no. 8, 1453-1464 incorporated herein by reference in its entirety).

[0205] Primary T cells were obtained from patients. The obtained primary T cells were transduced with lentiviral vectors to obtain modified T cells. Flow-cytometry was performed and analyzed to confirm the expression of CARs in primary T cells (See FIG. 6). Techniques related to cell cultures, construction of lentiviral vectors, and flow cytometry may be found in “Control of large, established tumor xenografts with genetically retargeted human T cells containing CD28 and CD137 domains,” PNAS, Mar. 3, 2009, vol. 106 no. 9, 3360-3365, which is incorporated herein by reference in its entirety.

### Example 2. IFN-γ Release in Co-Cultivation Assays

[0206] T cells were transfected with the lentiviral vectors encoding dual CARs (CD19 and TA-MUC1 CARs, see dual CARs in FIGS. 8 and 9) and lentiviral vectors encoding single CAR (TA-MUC1 CAR, see 5E5 CAR in FIGS. 8 and 9), respectively. Two types of T cells and different single type or multiple types of substrate cells were co-cultured and the release of IFN-γ was observed. Substrate cells include MUC1-positive tumor cells (MCF-7), MUC1-negative tumor cells (231), and CD19-positive tumor cells (RK19). A ratio of E:T (Effector Cell: Target Cell) 1:1/3:1/10:1/30:1 (i.e., CART cells: target tumor cells) of CART cells and target tumor cells were co-cultured for 24 hours. Subsequently, the supernatant was collected, and release of IFN-γ was measured. Various levels of IFN-γ release were observed when CAR T cells and the substrate cells were co-cultured (See FIG. 7). As further shown in FIGS. 8 and 9, dual CAR T cells released IFN-γ in response to co-culturing with CD19-positive tumor cells and MUC1-positive tumor cells, while single CAR T cells released little IFN-γ in response to co-culturing with CD19-positive tumor cells. Further, in response to co-culturing with CD19-positive tumor cells and MUC1-positive tumor cells, dual CAR T cells released a greater amount of IFN-γ as compared to single CAR T cells. Techniques related to cell cultures, construction of cytotoxic T-lymphocyte assay may be found in “Control of large, established tumor xenografts with genetically retargeted human T cells containing CD28 and CD137 domains,” PNAS, Mar. 3, 2009, vol. 106 no. 9, 3360-3365, which is incorporated herein by reference in its entirety.

### Example 3. Expression of CAR/Antigen on Primary T Cells

[0207] Primary T cells were obtained from a patient. The obtained primary T cells were divided into two groups. Primary T cells in Group 1 were transduced with lentiviral vectors including a nucleic acid sequence encoding Anti-TSHR CAR (SEQ ID: 8). Primary T cells in Group 2 were transduced with lentiviral vectors including a nucleic acid sequence encoding TSHR (SEQ ID: 20). Flow-cytometry was performed and analyzed to determine the expression of CAR and TSHR in primary T cells, respectively (FIGS. 8 and 9). Techniques related to cell cultures, construction of lentiviral vectors, and flow cytometry may be found in “Control of large, established tumor xenografts with genetically retargeted human T cells containing CD28 and CD137 domains,” PNAS Mar. 3, 2009, vol. 106 no. 9, 3360-3365, which is incorporated herein by reference in its entirety.

### Example 4. In Vivo Cytokine Release Assay

[0208] Primary T cells of Group 1 and Group 2 were infused into mice (Experimental Group). As a control, Primary T cells of Group 1 alone or buffer were infused into mice (Control Group 1 and Control Group 2). Several parameters regarding cell infusion are provided in Table 1 below. NPG™ (NOD Prkdc^{scid} IL2rg^{null}) mice were irradiated, and a certain number of CAR T cells and corresponding control agents were infused into mice. For Control Group 2, three consecutive buffers were returned to the mice. For Control Group 1, T cells that did not express antigen were returned three times in succession. For Experimental Group, T cells expressing antigens were continuously transfused three times in succession. After the transfusion was completed, blood from the limbal vein was collected to analyze the T cells and factor release (e.g., cytokine release) in the peripheral blood of the mice. The mice were then sacrificed, and T ratios of each organ/CAR T Cell ratio/CAR T copy and other data were collected. Cytokine release assay was then performed. Various cytokines (e.g., IFN-γ, IL4, IL2) in mice peripheral blood were measured for Experimental Group and Control Group. As shown in FIGS. 10-13, the amount of cytokine released in the Experimental Group was greater than those in the Control Group. These results demonstrate that infusion of cells expressing an antigen enhances the corresponding CAR T cells' T cell response. Table 2 summarizes the infusion of T cells into mice, and Table 3 provides the schedule for in vivo analysis cytokine release.

TABLE 2

| Experimental Group | Control Group 1 | Control Group 2 |
|---|---|---|
| Anti-TSHR CAR T cells | Anti-TSHR CAR T cells | Anti-TSHR CAR T cells |
| about 4 × 10⁶/mouse | about 4 × 10⁶/mouse | about 4 × 10⁶/mouse |
| Antigen T (TSHR- | NT (non-transduced T cell) | NT (non-transduced T cell) |
| overexpressed T cell) about | about 4 × 10⁶/mouse per time | about 4 × 10⁶/mouse per time |
| 4 × 10⁶/mouse per time | | |

TABLE 3

| Day | Day | Day | Day | Day | Day | Day | Day |
|---|---|---|---|---|---|---|---|
| 1 | 3 | 5 | 9 | 12 | 14 | 21 | 28 |
| irra- | anti- | buffers/ | buffers/ | buffers/ | bleed- | bleed- | sacrifice |
| diation | TSHR | nt/ | nt/ | nt/ | ing | ing | and |
| at | CAR | antigen | antigen | antigen | and | and | analy- |
| 1.5 | T | T | T | T | analy- | analy- | sis |
| Gy | cells | in- | in- | in- | sis | sis | |
| | infusion | fusion | fusion | fusion | | | |

[0209] The following table (Table 4) shows various polypeptide domains and nucleic acid constructs and their Sequence Identifiers (SEQ ID NO). (CD19 refers to CD19 CAR; MUC1 refers to tMUC1 CAR; A, B, C, and D refer to specific sequences of hinge and/or transmembrane domain of corresponding CARs)

TABLE 4

| | SEQ | | SEQ | | SEQ |
|---|---|---|---|---|---|
| Name | ID NO: | Name | ID NO: | Name | ID No: |
| SP | 1 | UPK2 | 101 | Construct of | 201 |
| | | | | MUC1-5E5-A- | |
| | | | | IRES-CD19-A | |
| Hinge & | 2 | ADAM12 | 102 | CAR 1 of MUC1- | 202 |
| transmembrane | | | | 5E5-A-IRES- | |
| domain | | | | CD19-A | |
| Co-stimulatory | 3 | SLC45A3 | 103 | CAR 2 of MUC1- | 203 |
| domain | | | | 5E5-A-IRES- | |
| | | | | CD19-A | |
| CD3-zeta | 4 | ACPP | 104 | Construct of | 204 |
| | | | | MUC1-5E5-B- | |
| | | | | IRES-CD19-A | |
| scFV Humanized | 5 | MUC21 | 105 | CAR 1 of MUC1- | 205 |
| CD19 | | | | 5E5-B-IRES- | |
| | | | | CD19-A | |
| SCFV CD19 | 6 | MUC16 | 106 | CAR 2 of MUC1- | 203 |
| | | | | 5E5-B-IRES- | |
| | | | | CD19-A | |
| scFv FZD10 | 7 | MS4A12 | 107 | Construct of | 206 |
| | | | | MUC1-5E5-A- | |
| | | | | IRES-CD19-B | |
| scFv TSHR | 8 | ALPP | 108 | CAR 1 of MUC1- | 202 |
| | | | | 5E5-A-IRES- | |
| | | | | CD19-B | |
| scFv PRLR | 9 | SLC2A14 | 109 | CAR 2 of MUC1- | 207 |
| | | | | 5E5-A-IRES- | |
| | | | | CD19-B | |
| scFv Muc 17 | 10 | GS1-259H13.2 | 110 | Construct of | 208 |
| | | | | MUC1-5E5-B- | |
| | | | | IRES-CD19-B | |
| scFv GUCY2C | 11 | ERVFRD-1 | 111 | CAR 1 of MUC1- | 205 |
| | | | | 5E5-B-IRES- | |
| | | | | CD19-B | |
| scFv CD207 | 12 | ADGRG2 | 112 | CAR 2 of MUC1- | 207 |
| | | | | 5E5-B-IRES- | |
| | | | | CD19-B | |
| Prolactin (ligand) | 13 | ECEL1 | 113 | Construct of | 209 |
| | | | | MUC1-2-A-IRES- | |
| | | | | CD19-A | |
| scFv CD3 | 14 | CHRNA2 | 114 | CAR 1 of MUC1-2- | 210 |
| | | | | A-IRES-CD19-A | |
| scFv CD4 | 15 | GP2 | 115 | CAR2of MUC1-2- | 203 |
| | | | | A-IRES-CD19-A | |
| scFv CD4-2 | 16 | PSG9 | 116 | Construct of | 211 |
| | | | | MUC1-2-B-IRES- | |
| | | | | CD19-A | |
| scFv CD5 | 17 | SIGLEC15 | 117 | CAR 1 of MUC 1-2- | 212 |
| | | | | B-IRES-CD19-A | |
| CD19 antigen | 18 | SLC6A3 | 118 | CAR 2 of MUC1-2- | 203 |
| | | | | B-IRES-CD19-A | |
| FZD10 antigen | 19 | KISS1R | 119 | Construct of | 213 |
| | | | | MUC1-2-A-IRES- | |
| | | | | CD19-B | |
| TSHR antigen | 20 | QRFPR | 120 | CAR 1 of MUC 1-2- | 210 |
| | | | | A-IRES-CD19-B | |
| PRLR antigen | 21 | GPR119 | 121 | CAR 2 of MUC1-2- | 207 |
| | | | | A-IRES-CD19-B | |
| Muc 17 antigen | 22 | CLDN6 | 122 | Construct of | 214 |
| | | | | MUC1-2-B-IRES- | |
| | | | | CD19-B | |
| GUCY2C antigen | 23 | SP-2 | 123 | CAR 1 of MUC 1-2- | 212 |
| | | | | B-IRES-CD19-B | |
| CD207 antigen | 24 | Linker-2 | 124 | CAR 2 of MUC1-2- | 207 |
| | | | | B-IRES-CD19-B | |
| CD3 antigen | 25 | Hinge-2 | 125 | Construct of | 215 |
| | | | | MUC1-5E5-A- | |
| | | | | IRES-hCD19-A | |
| CD4 antigen | 26 | TM-2 | 126 | CAR 1 of MUC1- | 202 |
| | | | | 5E5-A-IRES- | |
| | | | | hCD19-A | |
| CD5 antigen | 27 | 4-1BB-2 | 127 | CAR 2 of MUC1- | 216 |
| | | | | 5E5-A-IRES- | |
| | | | | hCD19-A | |
| CAR CD19 | 28 | CD3 zeta-2 | 128 | Construct of | 217 |
| nucleic acid | | | | MUC1-5E5-B- | |
| | | | | IRES-hCD19-A | |
| Hinge & TM | 29 | CLDN6-CAR-1 | 129 | CAR 1 of MUC1- | 205 |
| domain B | | | | 5E5-B-IRES- | |
| | | | | hCD19-A | |
| Hinge & TM | 30 | ScFv CLDN6- | 130 | CAR 2 of MUC1- | 216 |
| domain A | | CAR-1 | | 5E5-B-IRES- | |
| | | | | hCD19-A | |
| Hinge & TM | 31 | ScFv VL CLDN6- | 131 | Construct of | 218 |
| domain D | | CAR-1 | | MUC1-5E5-A- | |
| | | | | IRES-hCD19-B | |
| Hinge & TM | 32 | ScFv VH CLDN6- | 132 | CAR 1 of MUC1- | 202 |
| domain C | | CAR-1 | | 5E5-A-IRES- | |
| | | | | hCD19-B | |
| Hinge | 33 | CLDN6-CAR-2 | 133 | CAR 2 of MUC1- | 219 |
| domain D | | | | 5E5-A-IRES- | |
| | | | | hCD19-B | |
| Hinge domain C | 34 | ScFv CLDN6- | 134 | Construct of | 220 |
| | | CAR-2 | | MUC1-5E5-B- | |
| | | | | IRES-hCD19-B | |
| Hinge domain B | 35 | ScFv VL CLDN6- | 135 | CAR 1 of MUC1- | 205 |
| | | CAR-2 | | 5E5-B-IRES- | |
| | | | | hCD19-B | |
| Hinge domain A | 36 | ScFv VH CLDN6- | 136 | CAR 2 of MUC1- | 219 |
| | | CAR-2 | | 5E5-B-IRES- | |
| | | | | hCD19-B | |
| TM domain D | 37 | CLDN6-CAR-3 | 137 | Construct of | 221 |
| | | | | MUC1-2-A-IRES- | |
| | | | | hCD19-A | |
| TM domain A | 38 | scFv CLDN6- | 138 | CAR 1 of MUC1-2- | 210 |
| | | CAR-3 | | A-IRES-hCD19-A | |
| CD19 extracellular | 39 | scFv VL CLDN6- | 139 | CAR 2 of MUC1-2- | 216 |
| domain | | CAR-3 | | A-IRES-hCD19-A | |
| TM domain | 40 | scFv VH CLDN6- | 140 | Construct of | 222 |
| C or B | | CAR-3 | | MUC1-2-B-IRES- | |
| | | | | hCD19-A | |
| WTCD3zeta | 41 | CLDN6-CAR-4 | 141 | CAR 2CAR 1 of | 212 |
| | | | | MUC1-2-B-IRES- | |
| | | | | hCD19-A | |
| WTCD3zeta- | 42 | scFv CLDN6- | 142 | Construct of | 216 |
| BCMACAR full | | CAR-4 | | MUC1-2-B-IRES- | |
| length | | | | hCD19-A | |
| BCMA | 43 | scFv VL CLDN6- | 143 | Construct of | 223 |
| | | CAR-4 | | MUC1-2-A-IRES- | |
| | | | | hCD19-B | |
| BCMA CAR vector | 44 | scFv VH CLDN6- | 144 | CAR 1 of MUC1-2- | 210 |
| | | CAR-4 | | A-IRES-hCD19-B | |
| BCMA CAR vector | 45 | SIGLEC-15-CAR-1 | 145 | CAR 2 of MUC1-2- | 219 |
| | | | | A-IRES-hCD19-B | |
| VL anti-CD5 | 46 | scFv SIGLEC-15- | 146 | Construct of | 224 |
| | | CAR-1 | | MUC1-2-B-IRES- | |
| | | | | hCD19-B | |
| VH anti-CD5 | 47 | scFv VL SIGLEC- | 147 | CAR 1 of MUC1-2- | 212 |
| | | 15-CAR-1 | | B-IRES-hCD19-B | |
| VL anti-CD4 | 48 | scFv VH SIGLEC- | 148 | CAR 2 of MUC1-2- | 219 |
| | | 15-CAR-1 | | B-IRES-hCD19-B | |
| VH anti-CD4 | 49 | VL1 VH1 SIGLEC- | 149 | Construct of | 225 |
| | | 15-CAR-2 | | MUC1-5E5-A- | |
| | | | | IRES-CD22-A | |
| VL anti-CD3 | 50 | VL1 VH2 SIGLEC- | 150 | CAR 1 of MUC1- | 202 |
| | | 15-CAR-3 | | 5E5-A-IRES- | |
| | | | | CD22-A | |
| VH anti-CD3 | 51 | VL1 VH3 SIGLEC- | 151 | CAR 2 of MUC1- | 226 |
| | | 15-CAR-4 | | 5E5-A-IRES- | |
| | | | | CD22-A | |
| TSHR extracellular | 52 | VL1 VH 4 SIGLEC- | 52 | Construct of | 227 |
| domain | | 15-CAR-5 | | MUC1-5E5-B- | |
| | | | | IRES-CD22-A | |
| VH region of | 53 | VL2 VH 1 SIGLEC- | 153 | CAR 1 of MUC1- | 205 |
| BCMA scFv | | 15-CAR-6 | | 5E5-A-IRES- | |
| | | | | CD22-A | |
| VL region of | 54 | VL2 VH2 SIGLEC- | 154 | CAR 2 of MUC1- | 226 |
| BCMA scFv | | 15-CAR-7 | | 5E5-A-IRES- | |
| | | | | CD22-A | |
| VH region of | 55 | VL2 VH3 SIGLEC- | 155 | Construct of | 228 |
| CD14 scFv | | 15-CAR-8 | | MUC1-5E5-A- | |
| | | | | IRES-CD22-B | |
| VL region of | 56 | VL2 VH4 SIGLEC- | 156 | MUC1-5E5-A- | 202 |
| CD14 scFv | | 15-CAR-9 | | IRES-CD22- | |
| | | | | B CAR1 | |
| VH region of | 57 | VL1 SIGLEC-15- | 157 | MUC1-5E5-A- | 229 |
| CD33 scFv | | CAR | | IRES-CD22- | |
| | | | | B CAR2 | |
| VL region of | 58 | VL2 SIGLEC-15- | 158 | MUC1-5E5-B- | 230 |
| CD33 scFv | | CAR | | IRES-CD22-B | |
| CD22CAR | 59 | VH1 SIGLEC-15- | 159 | CAR 1 of MUC1- | 205 |
| | | CAR | | 5E5-B-IRES- | |
| | | | | CD22-B | |
| BCMACAR | 60 | VH2 SIGLEC-15- | 160 | CAR 2 of MUC1- | 229 |
| | | CAR | | 5E5-B-IRES- | |
| | | | | CD22-B | |
| MUC1CAR | 61 | VH3 SIGLEC-15- | 161 | Construct of | 231 |
| | | CAR | | MUC1-2-A-IRES- | |
| | | | | CD22-A | |
| m19CAR-IRES- | 62 | VH4 SIGLEC-15- | 162 | CAR 1 of MUC1-2- | 210 |
| MUC1CAR | | CAR | | A-IRES-CD22-A | |
| hCD19CAR-IRES- | 63 | MUC16-CAR-1 | 163 | CAR 2 of MUC1-2- | 226 |
| MUC1CAR | | | | A-IRES-CD22-A | |
| hCD22CAR-IRES- MUC1CAR | 64 | scFv MUC16- CAR-1 | 164 | MUC1-2-B-IRES- CD22-A | 232 |
| BCMACAR-IRES- | 65 | scFv VL MUC16- | 165 | MUC1-2-B-IRES- | 212 |
| MUC1CAR | | CAR-1 | | CD22-A CAR 1 | |
| mCD19CAR-2A- | 66 | scFv VH MUC16- | 166 | MUC1-2-B-IRES- | 226 |
| MUC1CAR | | CAR-1 | | CD22-A CAR 2 | |
| hCD19CAR-2A- | 67 | MUC16-CAR-2 | 167 | MUC1-2-A-IRES- | 233 |
| MUC1CAR | | | | CD22-B | |
| hCD22CAR-2A- | 68 | scFv MUC16- | 168 | MUC1-2-A-IRES- | 210 |
| MUC1CAR | | CAR-2 | | CD22-B CAR 1 | |
| BCMA-2A- | 69 | scFv VL MUC16- | 169 | MUC1-2-A-IRES- | 229 |
| MUC1CAR | | CAR-2 | | CD22-B CAR 2 | |
| Tumor associated | 70 | scFv VH MUC16- | 170 | Construct of | 234 |
| MUC1 scFv 1 | | CAR-2 | | MUC1-2-B-IRES- | |
| | | | | CD22-B | |
| Tumor associated | 71 | KISS1R-CAR | 171 | CAR 1 of MUC1-2- | 212 |
| MUC1 scFv-1 VH | | | | B-IRES-CD22-B | |
| Tumor associated | 72 | Ligent peptide | 172 | CAR 2 of MUC1-2- | 229 |
| MUC1 scFv-1 VL | | KISS1R-CAR | | B-IRES-CD22-B | |
| Tumor associated | 73 | ZFLm1 (left) | 173 | Construct of | 235 |
| MUC1 scFv-1 VL | | RS aa | | MUC1-5E5-A- | |
| CDR 1 | | | | IRES-CD14-A | |
| L2D8-2 (hCAR VL) | 74 | ZFLm1 (left) F1 | 174 | CAR 1 of MUC1- | 202 |
| | | | | 5E5-A-IRES- | |
| | | | | CD14-A | |
| Tumor associated | 75 | ZFLm1 (left) F2 | 174 | CAR 2 of MUC1- | 236 |
| MUC1 scFv-1 VL | | | | 5E5-A-IRES- | |
| CDR 3 | | | | CD14-A | |
| Tumor associated | 76 | ZFLm1 (left) F3 | 176 | Construct of | 237 |
| MUC1 scFv-1 VH | | | | MUC1-5E5-B- | |
| CDR 1 | | | | IRES-CD14-A | |
| Tumor associated | 77 | ZFLm1 (left) F4 | 177 | CAR 1 of MUC1- | 205 |
| MUC1 scFv-1 VH | | | | 5E5-B-IRES- | |
| CDR 2 | | | | CD14-A | |
| Tumor associated | 78 | ZFLm1 (left) F5 | 178 | CAR 2 of MUC1- | 236 |
| MUC1 scFv-1 VH | | | | 5E5-B-IRES- | |
| CDR 3 | | | | CD14-A | |
| Tumor associated | 79 | ZFLm1 (left) F6 | 179 | Construct of | 238 |
| MUC1 scFv 2 | | | | MUC1-5E5-A- | |
| | | | | IRES-CD14-B | |
| Tumor associated | 80 | ZFRm1-4 | 180 | CAR 1 of MUC1- | 202 |
| MUC1 scFv2 VH | | (right) RS aa | | 5E5-A-IRES- | |
| | | | | CD14-B | |
| Tumor associated | 81 | ZFRm1-4 | 181 | CAR 2 of MUC1- | 239 |
| MUC1 scFv2 VL | | (right) F1 | | 5E5-A-IRES- | |
| | | | | CD14-B | |
| Tumor associated | 82 | ZFRm1-4 | 182 | Construct of | 240 |
| MUC1 scFv-2 VL | | (right) F2 | | MUC1-2-A-IRES- | |
| CDR 1 | | | | CD14-A | |
| Tumor associated | 83 | ZFRm1-4 | 184 | CAR 1 of MUC1-2- | 210 |
| MUC1 scFv-2 VL | | (right) F3 | | A-IRES-CD14-A | |
| CDR 2 | | | | | |
| Tumor associated | 84 | ZFRm1-4 | 184 | CAR 2 of MUC1-2- | 236 |
| MUC1 scFv-2 VL | | (right) F4 | | A-IRES-CD14-A | |
| CDR 3 | | | | | |
| ′Tumor associated | 85 | δ chain-1 of | 185 | Construct of | 241 |
| MUC1 scFv-2VH | | V_{Y}9Vδ2 | | MUC1-2-B-IRES- | |
| CDR 1 | | | | CD14-A | |
| Tumor associated | 86 | _{Y} chain-2 of | 186 | CAR 1 of MUC1-2- | 212 |
| MUC1 scFv-2 VH | | V_{Y}9Vδ2 | | B-IRES-CD14-A | |
| CDR 2 | | | | | |
| Tumor associated | 87 | δ chain-2 of | 187 | CAR 2 of MUC1-2- | 236 |
| MUC1 scFv-2 VH | | V_{Y}9Vδ2 | | B-IRES-CD14-A | |
| CDR 3 | | | | | |
| GSTA motif | 88 | V_{Y}9Vδ2 TCR-1: | 188 | Construct of | 242 |
| | | DG. SF13 _{Y} chain | | MUC1-2-A-IRES- | |
| | | | | CD14-B | |
| Modified PD-1 | 89 | V_{Y}9Vδ2 TCR-1 : | 189 | CAR 1 of MUC1-2- | 210 |
| intracellular | | DG. SF13 δ chain | | A-IRES-CD14-B | |
| domain-1 | | | | | |
| Modified PD-1 | 90 | V_{Y}9Vδ2 TCR-2: | 190 | CAR 2 of MUC1-2- | 239 |
| intracellular | | DG. SF68: _{Y} chain | | A-IRES-CD14-B | |
| domain-2 | | | | | |
| Modified PD-1 | 91 | V_{Y}9Vδ2 TCR-2: | 191 | Construct of | 243 |
| intracellular | | DG. SF68: δ chain | | MUC1-2-B-IRES- | |
| domain-3 | | | | CD14-B | |
| Modified PD-1 | 92 | V_{Y}9Vδ2 TCR-3: | 192 | CAR 1 of MUC1-2- | 212 |
| intracellular | | 12G12: _{Y} chain | | B-IRES-CD14-B | |
| domain-4 | | | | | |
| Modified PD-1 | 93 | V_{Y}9Vδ2 TCR-3: | 193 | CAR 2 of MUC1-2- | 239 |
| intracellular | | 12G12: δ chain | | B-IRES-CD14-B | |
| domain-5 | | | | | |
| Removed PD-1 | 94 | V_{Y}9Vδ2 TCR-4: | 194 | Construct of | 244 |
| intracellular | | CP.1.15 _{Y} chain | | MUC1-5E5-A- | |
| domain-1 | | | | IRES-BCMA-A | |
| Removed PD-1 | 95 | TCR-4: CP.1.15 | 195 | CAR 1 of MUC1- | 202 |
| intracellular | | δ chain | | 5E5-A-IRES- | |
| domain-2 | | | | BCMA-A | |
| Fokl WC | 96 | WT CD3-zeta | 196 | CAR 2 of MUC1- | 245 |
| | | | | 5E5-A-IRES- | |
| | | | | BCMA-A | |
| M Fokl | 97 | Invariant sequence | 197 | Construct of | 246 |
| | | for iNKT α chain | | MUC1-5E5-B- | |
| | | (hVα24-JαQ-TRAC) | | IRES-BCMA-A | |
| M Fokl | 98 | An example for | 198 | CAR 1 of MUC1- | 205 |
| | | iNKT β chain | | 5E5-B-IRES- | |
| | | sequence | | BCMA-A | |
| | | (containing vβ 11): | | | |
| _{Y} chain-1 of | 99 | Invariant sequence | 199 | CAR 2 of MUC1- | 245 |
| V_{Y}9Vδ2 | | for MAIT α chain | | 5E5-B-IRES- | |
| | | (hAV7S2-AJ33 α | | BCMA-A | |
| | | chain) (version 1) | | | |
| VL anti-CD4-2 | 100 | VH anti- CD4-2 | 200 | Construct of | 247 |
| | | | | MUC1-5E5-A- | |
| | | | | IRES-BCMA-B | |
| CAR 1 of MUC1-2- | 210 | CAR 1 of MUC1- | 205 | CAR 1 of MUC1- | 202 |
| A-IRES-CD33-A | | 5E5-B-IRES- | | 5E5-A-IRES- | |
| | | CD33-A | | BCMA-B | |
| CAR 2 of MUC1-2- | 255 | CAR 2 of MUC1- | 255 | CAR 2 of MUC1- | 248 |
| A-IRES-CD33-A | | 5E5-B-IRES- | | 5E5-A-IRES- | |
| | | CD33-A | | BCMA-B | |
| Construct | 261 | Construct of MUC1- | 257 | Construct of | 249 |
| of MUC1-2-B- | | 5E5-A-IRES- | | MUC1-5E5-B- | |
| IRES-CD33-A | | CD33-B | | IRES-BCMA-B | |
| CAR 1 of MUC1-2- | 212 | CAR 1 of MUC1- | 202 | CAR 1 of MUC1- | |
| B-IRES-CD33-A | | 5E5-A-IRES- | | 5E5-B-IRES- | |
| | | CD33-B | | BCMA-B | |
| CAR 2 of MUC1-2- | 255 | CAR 2 of MUC1- | 258 | CAR 2 of MUC1- | |
| B-IRES-CD33-A | | 5E5-A-IRES- | | 5E5-B-IRES- | |
| | | CD33-B | | BCMA-B | |
| Construct | 262 | Construct of MUC1- | 259 | Construct of | 250 |
| of MUC1-2-A- | | 5E5-B-IRES- | | MUC1-2-A-IRES- | |
| IRES-CD33-B | | CD33-B | | BCMA-A | |
| CAR 1 of MUC1-2- | 210 | CAR 1 of MUC1- | 205 | CAR 1 of MUC1-2- | 210 |
| A-IRES-CD33-B | | 5E5-B-IRES- | | A-IRES-BCMA-A | |
| | | CD33-B | | | |
| CAR 2 of MUC1-2- | 258 | CAR 2 of MUC1- | 258 | CAR 2 of MUC1-2- | 245 |
| A-IRES-CD33-B | | 5E5-B-IRES- | | A-IRES-BCMA-A | |
| | | CD33-B | | | |
| Construct | 263 | Construct of MUC1- | 260 | Construct of | 251 |
| of MUC1-2-B- | | 2-A-IRES-CD33-A | | MUC1-2-B-IRES- | |
| IRES-CD33-B | | | | BCMA-A | |
| CAR 1 of MUC1-2- | 212 | Construct of MUC1- | 253 | CAR 1 of MUC1-2- | 212 |
| B-IRES-CD33-B | | 2-B-IRES-BCMA-B | | B-IRES-BCMA-A | |
| CAR 2 of MUC1-2- | 258 | CAR 1 of MUC1-2- | 212 | CAR 2 of MUC1-2- | 245 |
| B-IRES-CD33-B | | B-IRES-BCMA-B | | B-IRES-BCMA-A | |
| Construct | 254 | MUC1-2-B-IRES- | 248 | Construct of | 252 |
| of MUC1-5E5-A- | | BCMA-B CAR 2 | | MUC1-2-A-IRES- | |
| IRES-CD33-A | | | | BCMA-B | |
| CAR 1 of MUC1- | 202 | MUC1-5E5-B- | 256 | CAR 1 of MUC1-2- | 210 |
| 5E5-A-IRES- | | IRES-CD33-A | | A-IRES-BCMA-B | |
| CD33-A | | | | | |
| CAR 2 of MUC1- | 255 | CAR 2 of MUC1-2- | 248 | Mcu1-5e5Panko- | 264 |
| 5E5-A-IRES- | | A-IRES-BCMA-B | | enhanced scFc | |
| CD33-A | | | | | |
| Mcu1-Panko5e5- | 265 | hinge and/or | 266 | hinge and/or | 267 |
| enhanced scFc | | transmembrane | | transmembrane | |
| | | domain A | | domain B | |
| hinge and/or | 268 | hinge and/or | 269 | Mcu1-5e5Panko- | 270 |
| transmembrane | | transmembrane | | enhanced | |
| domain C | | domain D | | scFc A 41BB CD2 | |
| | | | | zeta | |
| Mcu1-5e5Panko- | 271 | Mcu1-5e5Panko- | 272 | Mcu1-5e5Panko- | 273 |
| enhanced | | enhanced | | enhanced | |
| scFc B 41BB CD2 | | scFc C 41BB CD2 | | scFc D 41BB CD2 | |
| zeta | | zeta | | zeta | |
| Mcu1-Panko5e5- | 274 | Mcu1-Panko5e5- | 275 | Mcu1-Panko5e5- | 276 |
| enhanced | | enhanced | | enhanced | |
| scFc A 41BB CD2 | | scFc B 41BB CD2 | | scFc C 41BB CD2 | |
| zeta | | zeta | | zeta | |
| Mcu1-Panko5e5- | 277 | GS linker | 278 | Construct of | 279 |
| enhanced | | | | TSHR CAR | |
| scFc D 41BB CD2 | | | | | |
| zeta | | | | | |
| M Fokl-1 | 280 | M Fokl-2 | 281 | Fokl WC | 282 |
| PSCA-CAR ScFv | 356 | | | | |

### Example 5. In Vivo Cell Expansion

[0210] These clinical studies were designed to assess the safety and efficacy of infusing autologous T cells modified to express several solid tumor markers specific CAR/4-1BB/CD3-into patients. On the first arm of the studies, patients received solid tumor marker-specific CAR T cells only. The solid tumor marker included TSHR and tMuc1. On the second arm, patients received CAR T cells directed to CD19 and tMuc1. T cells of the patients were obtained, modified, and infused to the patients. T cell responses of patients from the first and second arms were measured and compared using the following protocols, which were approved by the hospitals where the trials were conducted. All patients were provided with written informed consent.

[0211] Lentiviruses were produced by transfecting 293T cells with TSHR-4-1BB vectors. tMuc1-4-1BB vector, CARtMuc1/CAR19-4-1BB vectors, and viral packaging plasmids, which were frozen in −80° C., were thawed immediately before transduction. The lentivirus supernatant was harvested. CD3+ T cells were isolated and activated as described (see Kalos M. et al, Sci Trans) Med 2011; 3:95ra73). The CD3+ T cells were then cultured in X-VIVO 15 medium (Lonza) containing 100 U/ml interleukin-2 (IL-2) and transduced with the lentivirus supernatant at high multiplicity of infection (MOI) from 5:1 to 10:1 within 24-48 hours. The CAR transduced T cells (TSHR-CAR T cell, tMuc1-CAR T cell, or tMuc1-CAR/CD19-CAR T cell, hereafter “dual CAR T cells”) were cultured for about 11 days. Three days before administration, fresh culture media were replaced. After that, the cells were not manipulated until transportation for infusion. The transduction efficiency was evaluated by flow cytometry (FACS) on days 5-7 after lentivirus transduction. The following anti-human antibodies were used: anti-hCD45 APC (BD Bioscience), anti-hCD3 FITC (BD Bioscience), biotin-labeled goat-anti-mouse IgG specific for F(ab′)2 fragment (Jackson immuno-Research, Cat #115-065-072) and PE streptavidin (BD Bioscience). Data acquisition was performed using a CytoFLEX flow cytometer (Beckman).

[0212] Prior to CART cell infusion, FACS analysis of transduction efficiency and in vitro cytotoxicity assays of CAR T cells were performed for each patient as described in this Example and Examples 1 and 2. Additionally, CAR T cell cultures were checked twice for possible contaminations by fungus, bacteria, Mycoplasma, Chlamydia, and endotoxin.

[0213] Peripheral blood mononuclear cells (PBMCs) were obtained from patients by leukapheresis for CAR T cell preparation on day 8, and the first day of CAR T infusion was set as study day 0. Patients were given a conditioning treatment for lymphodepletion. Fludarabine- and cyclophosphamide-based conditioning treatment varied according to the tumor burden in the bone marrow (BM) and peripheral blood (PB). CAR T cells were transfused to patients. Each day CAR T cells were transported to hospital, washed, counted, checked for viability and then prepared for administration to patients, who were then observed closely for at least 2 hours. CRS was graded according to a revised grading system (See Lee D W. et al, Blood 2014; 124:188-95). Other toxicities during and after therapy were assessed according to the National Institutes of Health Common Terminology Criteria for Adverse Events Version 4.0 (http://ctep.cancer.gov/). Therapy responses were assessed by flow cytometry and morphological analysis. When possible, patients were assessed by chimeric gene expression levels. The response type was defined as minimal residual disease (MRD) negative, complete response, complete response with incomplete count recovery, stable disease, and progressive disease.

[0214] Serial BM and PB samples after CAR T cell infusion were collected in K2EDTA BD vacutainer tubes (BD). The persistence of CAR19 T cells from fresh PB and BM in patients was determined by FACS. Circulating CAR T cell numbers per μl were calculated on the basis of measured absolute CD3+T lymphocyte counts. Simultaneously, CAR DNA copies were evaluated as another method of determining CAR T cell expansion and persistence. Genomic DNA was extracted using a QIAamp DNA Blood Mini Kit (Qiagen) from cryopreserved PB and BM. CAR DNA copies were assessed by quantitative real-time PCR as described in the supplementary materials. The levels of cytokines IFN-γ, TNF-α, IL-4, IL-6, IL-10, IL-17, etc. in serum and CSF were measured in a multiplex format according to the manufacturer's instructions.

[0215] Genomic DNA was extracted using a QIAamp DNA Blood Mini Kit (Qiagen) from cryopreserved peripheral blood and bone marrow. Quantitative PCR (qPCR) was performed in real-time in triplicates using the ABI 2×TaqMan Universal Master Mix with AmpErase UNG (Applied Biosystems) in a 7500 real-time PCR system (Applied Biosystems). Copy numbers per microgram of genomic DNA were calculated from a standard curve of 10-fold serial dilutions of purified CAR plasmid containing 102-108 copies/μL. Amplification of an internal control gene was used for normalization of DNA quantities. Primers/probes specific for the CAR19 transgene and an internal control gene were as previously described (see Gökbuget N. et al., Blood 2012; 120:2032-41 and O'Brien S. et al, J Clin Oncol 2013; 31:676-83).

[0216] CART cell expansion and cytokine release of these patients are shown in FIGS. 16-20 and 49-52. These results demonstrate that T cells expressing CD19 CAR and tumor marker specific CAR expanded more and released more cytokines (e.g., IL-6 an IFN-γ) than T cells expressing only the tumor maker specific CAR. Information regarding the patients and their corresponding T cells are provided below in Table 5.

TABLE 5

| | | | CAR | | | | |
|---|---|---|---|---|---|---|---|
| | | | binding | | CAR | | |
| | | | solid | | binding | | |
| | | | tumor | | B cell | | |
| | | solid | antigen | | Antigen | Vector | |
| Patient | Cancer | tumor | SEQ | B cell | SEQ | SEQ | Infusion |
| ID | type | antigen | ID | antigen | ID | ID | (date dosage) |
| A | Thyroid | TSHR | 8 | N/A | N/A | 280 | 1st: 1.08 * 10⁵/kg |
| | cancer | | | | | | |
| B | Cholangio- | tMuc1 | 70 | N/A | N/A | 61 | 1st: 1.01 * 10⁷/kg |
| | carcinoma | | | | | | |
| C | Pancreatic | tMuc1 | 70 | N/A | N/A | 61 | 1st: 1.27 * 10⁶/kg |
| | cancer | | | | | | 2nd: 71 Days after the |
| | | | | | | | 1st: (1.29 * 10⁷/Kg) |
| D | Breast | tMuc1 | 70 | N/A | N/A | 61 | 1st Date: 1*10⁵/kg |
| | Cancer | | | | | | 2nd: 24 Days after the |
| | | | | | | | 1st: (1.24 * 10⁶/Kg) |
| | | | | | | | 3rd: 37 days after the |
| | | | | | | | 2nd: 9.65 * 10⁶ |
| E | Breast | tMuc1 | 70 | CD19 | 5 | 201 | 1st: 1.15 * 10⁵/kg |
| | cancer | | | | | | |
| F | Pancreatic | tMuc1 | 70 | CD19 | 5 | 201 | 1st: 1.15 * 10⁶/kg |
| | cancer | | | | | | |

[0217] FIGS. 51-52 show an elevated release of cytokines IL-6 and IFN-γ in patient F administered with a first CAR and a second CAR and compared with patient C administered with only one CAR. The elevated release of cytokines IL-6 and IFN-γ confirms the efficacy of the CAR T cell therapy using a first and a second CAR molecule, each CAR molecule binds a different antigen.

### Example 6. Design of ZFNs I

[0218] Multiple gene-specific ZFNs were constructed to enable the site specific introduction of mutations at these genes. Various ZFNs were designed and incorporated into plasmid vectors essentially as described in Mala et al. (2005) Biochem Biophys Res Commun 335(2):447-57, Liu et al. (2002) J Bio Chem 277(6):3850-6, Sander et al. (2011) Nat Methods. 8(1):67-9, Urnov et al. (2005) Nature 435(7042):646-651, and U.S. Patent Publication 2008/0131962. The ZFNs included various combinations of Zinc finger binding domains (e.g., ZFN-left and ZFN-right binding domains), which are listed in Table 6 and Table 7. The cleavage domain of the ZFNs comprised an engineered Fokl cleavage domain (SEQ ID NOS.: 280, 281, or 282).

TABLE 6
Exemplary ZFN pairs as well as the target sequences (Target site: the target sequence
for ZFN include two 9-bp recognition sites (i.e., upper case letters) are separated
by a 6-bp spacer)

| | ICT | | | | | | | | | |
|---|---|---|---|---|---|---|---|---|---|---|
| Gene | ZFN | | Finger | SEQ ID | Finger | SEQ ID | Finger | SEQ ID | | SEQ ID |
| Name | Number | ZFN | 1 | NO: | 2 | NO: | 3 | NO: | Target site | NO: |
| CTLA4 | ICTZF1 | ZFN-L | QSGSL | 301 | DRSDL | 302 | QSSAL | 303 | TGCGGCA | 304 |
| | L | | TR | | TR | | TR | | ACctacatGA | |
| | | | | | | | | | TGGGGAA | |
| | ICTZF1 | ZFN-R | QRSNL | 305 | RSDHL | 306 | TSANL | 307 | | |
| | R | | VR | | TR | | SR | | | |
| LAG 3 | ICTZF2 | ZFN-L | QSSDL | 308 | RSDNL | 309 | QSGH | 310 | AGCCTCTC | 311 |
| | L | | TR | | AR | | LQR | | CagccaGG | |
| | | | | | | | | | GGCTGAG | |
| | ICTZF2 | ZFN-R | RSDNL | 309 | QSSDL | 308 | RSDHL | 312 | | |
| | R | | AR | | TR | | SR | | | |
| LAG 3 | ICTZF3 | ZFN-L | RSDHL | 313 | QSGD | 314 | RSDDL | 315 | CCCTGCC | 319 |
| | L | | AR | | LTR | | TR | | GCctgcctGC | |
| | | | | | | | | | TGGTGTG | |
| | ICTZF3 | ZFN-R | RSDAL | 316 | TSGHL | 317 | QSSDL | 318 | | |
| | R | | TR | | VR | | QR | | | |
| BTLA | ICTZF4 | ZFN-L | GGTAL | 320 | QRSSL | 321 | QRNN | 322 | GTTTACTT | 326 |
| | L | | RM | | VR | | LGR | | CctttggGGG | |
| | | | | | | | | | GATTGC | |
| | ICTZF4 | ZFN-R | RKRNL | 323 | VRHNL | 324 | RGDKL | 325 | | |
| | R | | IM | | TR | | GP | | | |
| TIM3 | ICTZF5 | ZFN-L | SRFTL | 327 | RREHL | 328 | QTATL | 329 | CACCCCTG | 333 |
| | L | | GR | | VR | | KR | | CaccgacTC | |
| | | | | | | | | | GGCAGAG | |
| | ICTZF5 | ZFN-R | KHSNL | 330 | QSTTL | 331 | RADGL | 332 | | |
| | R | | AR | | KR | | QL | | | |
| TIM3 | ICTZF6 | ZFN-L | TRQKL | 334 | RQDN | 335 | QQHG | 336 | ACCCTCAC | 340 |
| | L | | ET | | LGR | | LRH | | AaccttTGG | |
| | | | | | | | | | GTTGTC | |
| | ICTZF6 | ZFN-R | TKKILT | 337 | HKSSL | 338 | RSDHL | 339 | | |
| | R | | V | | TR | | SL | | | |
| FOXP3 | ICTZF7 | ZFN-L | RKHHL | 341 | RREHL | 28 | VSNSL | 342 | CCCCCCA | 346 |
| | L | | GR | | VR | | AR | | GCacccttTC | |
| | | | | | | | | | GGCTGTG | |
| | ICTZF7 | ZFN-R | RTSSL | 343 | QRSDL | 344 | RSDGL | 345 | | |
| | R | | KR | | TR | | RG | | | |
| FOXP3 | ICTZF8 | ZFN-L | DSPTL | 347 | QSAHL | 348 | QDVSL | 349 | GGCTCCT | 352 |
| | L | | RR | | KR | | VR | | GCtgcatcGT | |
| | | | | | | | | | AGCTGCT | |
| | ICTZF8 | ZFN-R | MKNTL | 350 | QRSDL | 344 | QSGTL | 351 | | |
| | R | | TR | | TR | | TR | | | |
| SIVA1 | ICTZF9 | ZFN-L | TKQIL | 353 | QSTTL | 331 | RTEHL | 354 | AGCTGCC | 296 |
| | L | | GR | | KR | | AR | | CCttcgcgGA | |
| | | | | | | | | | CGTGGCC | |
| | ICTZF9 | ZFN-R | KRRDL | 355 | RREVL | 300 | DPSNL | 299 | | |
| | R | | DR | | EN | | RR | | | |
| LGALS | ICTZF1 | ZFN-L | MKHH | 298 | VRHNL | 324 | HHNSL | 297 | ACCATCAA | 293 |
| 9 | 0L | | LDA | | TR | | TR | | CagactgGA | |
| | | | | | | | | | AGTGGGG | |
| | ICTZF1 | ZFN-R | KKDHL | 295 | RREVL | 300 | QTVNL | 294 | | |
| | 0R | | HR | | EN | | DR | | | |
| CD33 | ICTZF1 | ZFN-L | QSGSL | 301 | RSDDL | 292 | RSDHL | 312 | TGCCGCC | 289 |
| | 1L | | TR | | QR | | SR | | CCtactgtGG | |
| | | | | | | | | | AGATGGA | |
| | ICTZF1 | ZFN-R | QSGH | 291 | TSGNL | 290 | QSGH | 310 | | |
| | 1R | | LAR | | VR | | LQR | | | |
| SIVA1 | ICTZF1 | ZFN-L | QSSDL | 308 | QSGD | 314 | RSDHL | 312 | AGCTGCC | 285 |
| | 2L | | TR | | LTR | | SR | | CCttcgcgGA | |
| | | | | | | | | | CGTGGCC | |
| | ICTZF1 | ZFN-R | ERGTL | 288 | RSDAL | 287 | DRSNL | 286 | | |
| | 2R | | AR | | SR | | TR | | | |
| FOXP3 | ICTZF1 | ZFN-L | ERGTL | 288 | QSGH | 310 | QSGD | 314 | GGCTCCT | 283 |
| | 3L | | AR | | LQR | | LTR | | GCtgcatcGT | |
| | | | | | | | | | AGCTGCT | |
| | ICTZF1 | ZFN-R | QSSDL | 308 | QSSDL | 308 | QRASL | 284 | | |
| | 3R | | TR | | TR | | TR | | | |

### Example 7. ZFN Activity In Vitro I

[0219] ZFN-left arm plasmid vectors and ZFN-right arm plasmid vectors were transfected into Hela cells using fugene transfection reagent, respectively. After transfection of 24 hours, Hela cells were treated with 1 μg/ml puromycin for 48 hours to obtain cells rich in ZFNs. The Hela cells were then collected, and lysed DNA fragment containing ZFNs were amplified by PCR using primers specific to various gene (i.e., CTLA4, LAG3, BTLA, TIM3, FOXP3, SIVA1, or LGALS9) and the genome of Hela cells as templates. The DNA fragments were sequenced using forward primers, and the sequencing results are shown in FIG. 21-25.

[0220] The DNA fragments were cloned into vectors. The DNA fragments of about 30 monoclonal cells were sequenced to determine whether the DNA fragments include mutations. The results of the sequencing were shown in Table 7.

TABLE 7
Monoclonal sequencing results for ZFNs that that
target genes fragments and are amplified by PCR

| | | Number | Number | |
|---|---|---|---|---|
| ZFN | | of clones | of clones | Mutation |
| Left | Right | analyzed | mutated | frequency |
| ICTZF1L | ICTZF1R | 31 | 6 | 19% |
| ICTZF2L | ICTZF2R | 26 | 3 | 12% |
| ICTZF3L | ICTZF3R | 30 | 9 | 30% |
| ICTZF4L | ICTZF4R | 30 | 4 | 13% |
| ICTZF5L | ICTZF5R | 29 | 1 | 3% |
| ICTZF6L | ICTZF6R | 30 | 4 | 13% |
| ICTZF7L | ICTZF7R | 29 | 5 | 17% |
| ICTZF8L | ICTZF8R | 33 | 7 | 21% |
| ICTZF9L | ICTZF9R | 34 | 10 | 29% |
| ICTZF10L | ICTZF10R | 27 | 2 | 7% |
| ICTZF11L | ICTZF11R | 34 | 14 | 41% |
| ICTZF12L | ICTZF12R | 24 | 3 | 13% |
| ICTZF13L | ICTZF13R | 21 | 5 | 24% |

### Example 8. Design of ZFNs 11

[0221] Multiple gene-specific ZFNs were constructed to enable the site-specific introduction of mutations in these genes. Various ZFNs were designed and incorporated into plasmid vectors essentially as described in Mala et al. (2005) Biochem Biophys Res Commun 335(2):447-57, Liu et al. (2002) J Bio Chem 277(6):3850-6, Sander et al. (2011) Nat Methods. 8(1):67-9, Handel et al. (2009) Mol Ther. January; 17(1):104-11, Urnov et al. (2005) Nature 435(7042):646-651, and U.S. Patent Publication 2008/0131962. The ZFNs included various combinations of Zinc finger binding domains (e.g., ZFN-left and ZFN-right binding domains), which are listed in Table 8. The cleavage domain of the ZFNs comprised an engineered Fokl cleavage domain (SEQ ID NOS.: 96, 97, or 98).

TABLE 8
Exemplary ZFN pairs as well as the target sequences (Target site: the target
sequence for ZFN include two 9-bp recognition sites (i.e., uppercase letters)
are separated by a 6-bp spacer).

| Gene | ICT | | | | | | Linker between |
|---|---|---|---|---|---|---|---|
| Name | ZFN# | ZFN | Finger 1 | Finger 2 | Finger 3 | Target site | ZFP and Fok1 |
| B2M | ICTZ | ZFN-L | RTSSLK | QRSDLT | RSDHLS | CACAGCC | TGPGAAARA |
| | F14L | | R | R | L | CAagatagtT | (SEQ ID NO: |
| | | | (SEQ ID | (SEQ ID | (SEQ ID | AAGTGGG | 417) |
| | | | NO: 357) | NO: 358) | NO: 359) | G | |
| | | | | | | (SEQ ID | |
| | | | | | | NO: 360) | |
| | ICTZ | ZFN-R | KKDHLH | RREVLE | QRGNL | | TGPGAAARA |
| | F14R | | R | N | NM | | (SEQ ID NO: |
| | | | (SEQ ID | (SEQ ID | (SEQ ID | | 417) |
| | | | NO:361) | NO: 362) | NO: 363) | | |
| CIITA | ICTZ | ZFN-L | VPSKLK | EAHHLS | QDGNL | GCCACCT | LRGSQ (SEQ |
| | F15L | | R | R | TR | TCccccaGC | ID NO: 418) |
| | | | (SEQ ID | (SEQ ID | (SEQ ID | TGAAGTC | |
| | | | NO: 364) | NO: 265) | NO: 366) | (SEQ ID | |
| | | | | | | NO: 400) | |
| | ICTZ | ZFN-R | TSTLLN | QQTNLT | VGNSLT | | LRGSQ (SEQ |
| | F15R | | R | R | R | | ID NO: 418) |
| | | | (SEQ ID | (SEQ ID | (SEQ ID | | |
| | | | NO: 367) | NO: 368) | NO: 369) | | |
| | ICTZ | ZFN-L | QSGSLT | TSGNLV | QSGDL | TGCATCT | LRGSQ (SEQ |
| | F16L | | R | R | TR | GCgacgtgG | ID NO: 418) |
| | | | (SEQ ID | (SEQ ID | (SEQ ID | GAGCCGA | |
| | | | NO: 370) | NO: 371) | NO: 372) | G | |
| | | | | | | (SEQ ID | |
| | | | | | | NO: 401) | |
| | ICTZ | ZFN-R | RSDNLA | DRSDLT | QSGHL | | LRGSQ (SEQ |
| | F16R | | R | R | QR | | ID NO: 418) |
| | | | (SEQ ID | (SEQ ID | (SEQ ID | | |
| | | | NO: 373) | NO: 374) | NO: 375) | | |
| | ICTZ | ZFN-L | DRSHLT | RSDALS | QSSDL | GCCCACA | LRGSQ (SEQ |
| | F17L | | R | R | QR | GCcactcGT | ID NO: 418) |
| | | | (SEQ ID | (SEQ ID | (SEQ ID | GGCGGCC | |
| | | | NO: 376) | NO: 377) | NO: 378) | (SEQ ID | |
| | | | | | | NO: 402) | |
| | ICTZ | ZFN-R | ERGTLA | RSDDL | RSDALT | | LRGSQ (SEQ |
| | F17R | | R | QR | R | | ID NO: 418) |
| | | | (SEQ ID | (SEQ ID | (SEQ ID | | |
| | | | NO: 379) | NO: 380) | NO: 381) | | |
| | ICTZ | ZFN-L | RSDHLA | QSGDL | QSGHL | CCCTGCT | LRGSQ (SEQ |
| | F18L | | R | TR | QR | CCctccgGG | ID NO: 418) |
| | | | (SEQ ID | (SEQ ID | (SEQ ID | GGCTGCT | |
| | | | NO: 382) | NO: 383) | NO: 384) | (SEQ ID | |
| | | | | | | NO: 403) | |
| | ICTZ | ZFN-R | QSSDLT | QSSDLT | RSDHLS | | LRGSQ (SEQ |
| | F18R | | R | R | R | | ID NO: 418) |
| | | | (SEQ ID | (SEQ ID | (SEQ ID | | |
| | | | NO: 385) | NO: 386) | NO: 387) | | |
| | ICTZ | ZFN-L | QSGHL | DRSDLT | QSGNL | TCCGGCT | LRGSQ (SEQ |
| | F19L | | AR | R | AR | TCtccatGG | ID NO: 407) |
| | | | (SEQ ID | (SEQ ID | (SEQ ID | AGCAGGC | |
| | | | NO: 388) | NO: 389) | NO: 390) | (SEQ ID | |
| | | | | | | NO:404) | |
| | ICTZ | ZFN-R | DRSHLT | QSGDL | QSGHL | | LRGSQ (SEQ |
| | F19R | | R | TR | QR | | ID NO: 418) |
| | | | (SEQ ID | (SEQ ID | (SEQ ID | | |
| | | | NO: 391) | NO: 392) | NO: 393) | | |
| | ICTZ | ZFN-L | RSHILT | QSTTLK | DGGHL | CACTGCG | LRGSQ (SEQ |
| | F20L | | N | R | TR | CCcacgagG | ID NO: 418) |
| | | | (SEQ ID | (SEQ ID | (SEQ ID | CCGAGGA | |
| | | | NO: 394) | NO: 395) | NO: 396) | G | |
| | | | | | | (SEQ ID | |
| | | | | | | NO: 405) | |
| | ICTZ | ZFN-R | RQMNL | RQDNL | DKSVLA | | LRGSQ (SEQ |
| | F20R | | DR | GR | R | | ID NO: 418) |
| | | | (SEQ ID | (SEQ ID | (SEQ ID | | |
| | | | NO: 397) | NO: 398) | NO: 399) | | |

### Example 9. ZFN Activity In Vitro II

[0222] ZFN-left arm plasmid vectors and ZFN-right arm plasmid vectors were transfected into Hela cells using fugene transfection reagent, respectively. After transfection of 24 hours, Hela cells were treated with 1 μg/ml puromycin for 48 hours to obtain cells rich in ZFNs. The Hela cells were then collected, and lysed DNA fragment containing ZFNs were amplified by PCR using primers specific to the various gene (i.e., B2M and CIITA) and the genome of Hela cells as templates. The DNA fragments were sequenced using forward primers, and the sequencing results are shown in FIGS. 27-30.

[0223] The DNA fragments were cloned into vectors. The DNA fragments of about 30 monoclonal cells were sequenced to determine whether the DNA fragments include mutations. The results of the sequencing were shown in Table 10.

### Example 10. Design of ZFNs III

[0224] T cells were introduced with TRAC-specific ZFNs constructed to enable the site-specific introduction of mutations at TRAC gene. Various ZFNs were designed and incorporated into plasmids vectors essentially as described in Urnov et al. (2005) Nature 435(7042):646-651, Lombardo et al. (2007) Nat Biotechnol. November; 25(11):1298-306, and U.S. Patent Publication 2008/0131962. The ZFNs included various combinations of Zinc finger binding domains (e.g., ZFN-left and ZFN-right binding domains), which are listed in Table 9. The cleavage domain of the ZFNs comprised a Fokl cleavage domain (SEQ ID NOS.: 96, 97, or 98). mRNA encoding a pair of ZFNs (See Table 9) was introduced into the transduced cells to modify a target genomic locus associated with α chain of TCR.

TABLE 9

| | Recognition | | | | | | |
|---|---|---|---|---|---|---|---|
| ZFN | Sequence | F1 | F2 | F3 | F4 | F5 | F6 |
| ZFLm1 | GTTGCT | QSGD | QWGT | ERGT | RSDN | QSGD | TSGA |
| (left) | CCAGGC | LTR | RYR | LAR | LRE | LTR | LTR |
| | CACAGC | (SEQ | (SEQ | (SEQ | (SEQ | (SEQ | (SEQ |
| | A | ID: | ID: | ID: | ID: | ID: | ID: |
| | (SEQ | 409) | 410) | 411) | 408) | 412) | 413) |
| | ID: | | | | | | |
| | 408) | | | | | | |
| ZFRm1 | GACTT | WRSS | QSGS | HKWV | DRSN | | |
| -4 | TGCAT | LAS | LTR | LRQ | LTR | | |
| (nght) | GT | (SEQ | (SEQ | (SEQ | (SEQ | | |
| | (SEQ | ID: | ID: | ID: | ID: | | |
| | ID: | 415) | 416) | 406) | 407) | | |
| | 414) | | | | | | |

### Example 11. TALENs Efficiency Detection

[0225] TALENs for CIITA were designed to target exon2 (2L1: gctgaccccctgtgcct (SEQ ID NO: 426); 2L2: gaccccctgtgcctct (SEQ ID NO: 427); 2R1: ctccagccaggtccatct (SEQ ID NO: 419); 2R2: tctccagccaggtccat (SEQ ID NO: 420)) and exon3 (3L1: tcagcaggctgttgt (SEQ ID NO: 421); 3L2: tcagcaggctgttgtgt (SEQ ID NO: 422); 3R1: ccctggtctcttcat (SEQ ID NO: 423); 3R2: aagcctccctggtctt (SEQ ID NO: 424); 3R3: aagcctccctggtct (SEQ ID NO: 425)). The TALENs were constructed with FastTALE TALEN Assembly Kit (Sidansai), and their activities were confirmed in 293T cells as previous description. The constructed TALENs were transfected into 293T cells and selected with 2 μg/ml puromycin (Sigma). The genomic DNA of 293T cells was harvested after selection. Then, PCR and sequencing were performed to examine the efficiency of the TALENs.

TABLE 10
Monoclonal sequencing results for ZFNs that
target various gene fragments and are amplified by PCR

| | | Number | Number | |
|---|---|---|---|---|
| ZFN | | of clones | of clones | Mutation |
| Left | Right | analyzed | mutated | frequency |
| ICTZF14L | ICTZF14R | 33 | 10 | 30% |
| ICTZF15L | ICTZF15R | 26 | 3 | 12% |
| ICTZF16L | ICTZF16R | 31 | 7 | 23% |
| ICTZF17L | ICTZF17R | 35 | 3 | 9% |
| ICTZF18L | ICTZF18R | 27 | 6 | 22% |
| ICTZF19L | ICTZF19R | 32 | 9 | 28% |
| ICTZF20L | ICTZF20R | 30 | 1 | 3% |

### Example 12. Cas9 Design and Analysis

[0226] The plasmids expressing Cas9 and gRNA were co-transfected into 293T cells with fugene transfection reagent. After 72 hours, 293T cells were collected and the expression of B2m and HLA proteins was detected by flow cytometry (FIG. 31).

### Example 13. MCF-7 and Double CAR Reinfusion I

[0227] 8 NPG female mice were used, and they were 6 weeks old. On day 0, each of the mice was inoculated with 350w MCF-7 cells to establish an orthotopic tumor model. On day 35, each of the mice was infused with the corresponding cells as shown in Table 11.

TABLE 11
Experimental protocol

| Tumor | Infusion | | |
|---|---|---|---|
| Modeling | Dose | Infused Cells | ID of Mice |
| MCF-7 | 1000 w/Per | NT | 827 |
| | Mouse | | 831 |
| | | 2407 (T cells expressing anti-MUC1 | 823 |
| | | CAR T cells, and the CAR binding | 830 |
| | | domain comprises SEQ ID NO: 70) | |
| | | (CARtMuc1 4-1BB) | |
| | | 1204 + 2407 (T cells expressing | 822 |
| | | anti-CD19 and MUC1 CAR | 828 |
| | | T cells, and the CAR of anti-CD19 | |
| | | comprises SEQ ID NO: 5) | |
| | | (CARtMuc1/CAR19-4-1BB) | |
| | | N/A | 824 |
| | | | 829 |

[0228] On Day 42, about 150 ul of blood from each mice was collected from the orbital venous plexus. On day 49, mice blood of the mice was collected from the orbital venous plexus about 150 ul each. Each peripheral blood was centrifuged to separate plasma, and plasma was used to measure cytokines. Peripheral blood-precipitated cells were stained with antibodies after being subjected to red-breaking treatment, followed by flow cytometry.

[0229] Percentages of T cells/mouse white blood cells in mouse peripheral blood were measured. Results are provided in FIGS. 32-39 and Table 12.

[0230] FIGS. 32-35 show flow cytometry results of human leukocytes/murine leukocytes in different groups. The cells were derived from all living cells after the mouse peripheral blood lysis. The horizontal axis represents the fluorescence intensity of hCD45 corresponding staining, and the vertical axis represents the fluorescence intensity of mCD45 corresponding staining.

[0231] FIGS. 36-39 show flow cytometry results of T cells/human leukocytes. The cells were derived from human leukocyte hCD45 in FIGS. 32-35, the horizontal axis represents the fluorescence intensity of CD3 corresponding staining, and the vertical axis represents the fluorescence intensity of CD19 corresponding staining.

TABLE 12
Leukocytes/murine leukocytes %

| Tumor | Infused | ID of | Leukocytes/murine |
|---|---|---|---|
| Modeling | Cells | Mice | leukocytes % |
| MCF-7 | NT | 827 | 0.54 |
| | | 831 | 4.9 |
| | 2407 | 823 | 37.12 |
| | | 830 | 12.16 |
| | 1204 + 2407 | 822 | 11.80 |
| | | 828 | 9.91 |
| | N/A | 824 | 0 |
| | | 829 | 0 |

[0232] As shown above, the proportion of T cells in the Mock group (N/A Infused Cells) was 0%, and the T cells in the NT group were less, which was in line with expectations. The proportion of T cells in group 2407 was greater than that in group 1204+2407, but further experiments were needed because the number of mice was small. Thus, double CAR cells can be activated like a single CAR cell.

[0233] FIG. 40 shows release of cytokines IL-2 and IFN-γ of each of the mice. Peripheral blood samples were obtained from the mice, and the supernatant were provided as follows (unit: pg/mL) in Table 13.

TABLE 13
Cytokine data

| Tumor | Infused | ID of | | |
|---|---|---|---|---|
| Modeling | Cells | Mice | IL-2 | IFN-_{Y} |
| MCF-7 | NT | 827 | 7 | 1.04 |
| | | 831 | 5.64 | 0 |
| | 2407 | 823 | 9.13 | 385.9 |
| | | 830 | 11.57 | 711.68 |
| | 1204 + 2407 | 822 | 11.57 | 736.36 |
| | | 828 | 8.49 | 1235.00 |
| | N/A | 824 | 7.29 | 3.23 |
| | | 829 | 7.29 | 1.04 |

[0234] As shown above, the IL-2 release levels of IL-2:2407 and 1204+2407 were slightly higher than those of NT and Mock (N/A Infused Cells). The IFN-γ release in the NT group and the Mock group was basically 0, and the IFN-γ release in the 1204+2407 group was much higher than that in the 2407 group. Thus, double CAR cells can release cytokines like a single CAR cell.

[0235] FIGS. 41-44 shows proportion of CD8/CD4 in mouse peripheral blood T cells. The cells were derived from CD3 positive cells in FIGS. 36-39, and the horizontal axis represents the fluorescence intensity of CD4 corresponding staining, and the vertical axis represents the fluorescence intensity of CD8 corresponding staining. Detailed results are provided in Table 14.

TABLE 14
CD8/CD4 in T Cells

| Tumor | Infused | ID of | CD8/CD4 |
|---|---|---|---|
| Modeling | Cells | Mice | in T Cells |
| MCF-7 | NT | 827 | 3.33:1 |
| | | 831 | 4:11:1 |
| | 2407 | 823 | 0.90:1 |
| | | 830 | 0.79:1 |
| | 1204 + 2407 | 822 | 0.88:1 |
| | | 828 | 0.99:1 |
| | N/A | 824 | N/A |
| | | 829 | N/A |

[0236] As shown above, the Mock group (N/A Infused Cells) has no CD8 and CD4. The 2407 group and the 1204+2407 group were basically flat, and the NT group CD8/CD4 ratio was much higher than the two groups.

### Example 14. MCF-7 and Double CAR Reinfusion 11

[0237] 17 NPG female mice were used, and they were 8 weeks old. After the animals arrived, they were sterilized and transferred to the animal room. The experimental animals were acclimatized for 7 days. The animals were observed in the cage daily during the adaptation period. After the end of the animal adaptation period, the animals were irradiated on the day before the experimental modeling. The irradiation dose was 1 Gy.

[0238] Mice were modeled on the second day after irradiation. MCF-7 cells were injected into the mammary fat pad of mice by in situ vaccination with a mammary fat pad to establish a tumor model. The day of modeling is Day 0.

TABLE 15
Mice modeling protocol

| Number | | | |
|---|---|---|---|
| of animals/ | Modeling | Modeling | Modeling |
| gender | cell | method | cell mass |
| 17/F | MCF-7 | In situ inoculation | 500 w/ |
| | | of breast fat pad | Mouse |

[0239] The modeled 17 mice were divided into 4 groups according to a random grouping as shown in Table 16.

TABLE 16
Experimental protocol

| | Nalm6 | Number |
|---|---|---|
| Returning cells | stimulation | of animals |
| 2407 + 1204 (T cells | NA | 4 |
| expressing anti-CD19 | | |
| and MUC1 CAR T cells) | | |
| 2407 (T cells | NA | 5 |
| expressing anti-MUC1 | | |
| CAR T cells) | | |
| 2407 + 1204 | Stimulation of | 5 |
| (Nalm6 stimulation) | Nalm6 cells prior to | |
| | cell reinfusion | |
| NT | NA | 3 |

[0240] After modeling, volumetric measurements of mouse tumors were initiated when visible tumors were visible to the naked eye. Nalm6 cell stimulation was performed as follow. Five mice in the 2407+1204 (Nalm6 stimulation) group in Day 9 were injected with Nalm6 cells for stimulation. Nalm6 cells were injected into mice by tail vein injection using the protocol in Table 17.

TABLE 17
Experimental protocol

| Stimulating cell | Stimulating cell mass |
|---|---|
| Nalm6 | 50 w/Mouse |

[0241] On day 10, each of the mice was infused (tail vein injection) with the corresponding cells as shown in Table 18.

TABLE 18
Experimental protocol

| | Return | Nalm6 | |
|---|---|---|---|
| Modeling cell | volume | stimulation | Animal number |
| 2407 + 1204 | 1000 w/ | no | 921. 922, 923, 924 |
| | Mouse | | |
| 2407 | 1000 w/ | no | 903, 904, 905, 906, 907 |
| | Mouse | | |
| 2407 + 1204 | 1000 w/ | Yes | 934, 938, 939, 940, 958 |
| (Nalm6 stimulation) | Mouse | | |
| NT | 1000 w/ | no | 908, 909, 910 |
| | Mouse | | |

[0242] Peripheral blood collection was performed on mice one week after cell reinfusion, and blood was collected through the orbital venous plexus. On day 17, the first blood collection was performed.

[0243] Peripheral blood was centrifuged to separate the plasma, and plasma was used to measure cytokines. Peripheral blood-precipitated cells were stained with antibodies after being subjected to red-breaking treatment, followed by flow cytometry. The data was analyzed and shown in FIGS. 45-47 (Peripheral blood flow data).

[0244] FIG. 45 shows results of T cell/mouse white blood cell. It can be seen from the statistics and the data in Table 19 that the ratios of white blood cells in the T cells/mouse of the NT group, the 2407 group, and the Nalm6+2407+1204 group are similar, and the ratios of the white blood cells of the 2407+1204 group to the other four groups of T cells/mouse are higher.

TABLE 19
T cell/mouse white blood cell

| Modeling | Returning | | T cell/mouse |
|---|---|---|---|
| cell | cells | Numbering | white blood cell |
| MCF-7 | NT | 908 | 13.58% |
| | | 909 | 11.41% |
| | | 910 | 16.35% |
| | 2407 | 903 | 20.63% |
| | | 904 | 8.60% |
| | | 905 | 6.33% |
| | | 906 | 8.66% |
| | | 907 | 19.43% |
| | 2407 + 1204 | 921 | 17.01% |
| | | 922 | 14.75% |
| | | 923 | 36.67% |
| | | 924 | 19.54% |
| | Nalm6 + | 934 | 14.20% |
| | 2407 + 1204 | 938 | 13.18% |
| | | 939 | 19.02% |
| | | 940 | 8.79% |
| | | 958 | 19.41% |

[0245] FIG. 46 shows results of CD8/CD4. It can be seen from the statistics data in Table 20 that there is no significant difference in the ratio of the four groups of CD8/CD4.

TABLE 20
Ratios of CD8/CD4

| Modeling | Returning | | |
|---|---|---|---|
| cell | cells | Numbering | CD8/CD4 |
| MCF-7 | NT | 908 | 8.25 |
| | | 909 | 8.48 |
| | | 910 | 7.41 |
| | 2407 | 903 | 8.12 |
| | | 904 | 7.35 |
| | | 905 | 7.51 |
| | | 906 | 10.33 |
| | | 907 | 9.01 |
| | 2407 + 1204 | 921 | 10.23 |
| | | 922 | 10.48 |
| | | 923 | 9.73 |
| | | 924 | 9.71 |
| | Nalm6 + | 934 | 9.59 |
| | 2407 + 1204 | 938 | 7.89 |
| | | 939 | 11.92 |
| | | 940 | 11.09 |
| | | 958 | 10.55 |

[0246] Peripheral blood samples from mice and the supernatant (unit: pg/mL) and cytokine data was analyzed (Table 21) and shown in FIG. 47. It can be seen from the statistical graph and tabular data that the release of IL-2 in group 2407 is higher than that in the other three groups. Further, it can be seen from the statistics and tabular data that the release of IFN in the 2407 group was significantly higher than the other three groups. The amount of IFN released in the 2407+1204 group and the Nalm6+2407+1204 group was relatively close.

TABLE 21
Cytokine data

| Modeling | Returning | | | |
|---|---|---|---|---|
| cell | cells | Numbering | IL-2 | IFN |
| MCF-7 | NT | 908 | 7.29 | 4.62 |
| | | 909 | 8.18 | 12.01 |
| | | 910 | 11.57 | 185.82 |
| | 2407 | 903 | 21.18 | 590.23 |
| | | 904 | 21.74 | 2033.41 |
| | | 905 | 19.57 | 1697.69 |
| | | 906 | 33.8 | 1348.12 |
| | | 907 | 9.46 | 182.51 |
| | 2407 + 1204 | 921 | 8.18 | 44.02 |
| | | 922 | 9.13 | 214.25 |
| | | 923 | 8.18 | 41.91 |
| | | 924 | 9.46 | 221.94 |
| | Nalm6 + | 934 | 8.49 | 325.22 |
| | 2407 + 1204 | 938 | 9.46 | 17.94 |
| | | 939 | 9.13 | 54.42 |
| | | 940 | 11.2 | 406.14 |
| | | 958 | 9.13 | 166.75 |

[0247] FIG. 48 shows tumor volumes change in mice in response to infusion with different cell groups. The tumor volumes in different mice were measured (unit: mm3, volume formula according to V=long diameter*short diameter*short diameter*0.5) in certain time periods after the infusion of the various cells. results are shown in the figure. It can be seen from the above figure that the tumor volume of the 2407+1204 group remained basically unchanged after the reinfusion, and the tumor volume was reduced in the Nalm6+2407+1204 group and the 2407 group, and the tumor volume of the NT group increased. Thus, both double CAR and single CAR have similar anti-tumor functions.

[0248] All publications, patents and patent applications cited in this specification are incorporated herein by reference in their entireties as if each individual publication, patent or patent application were specifically and individually indicated to be incorporated by reference. While the foregoing has been described in terms of various embodiments, the skilled artisan will appreciate that various modifications, substitutions, omissions, and changes may be made without departing from the spirit thereof.

1-19. (canceled)

20. A method of enhancing T cell response in a subject having a solid tumor, the method comprising:
introducing a polynucleotide encoding a first chimeric antigen receptor (CAR) and a polynucleotide encoding a second CAR into T cells, thereby obtaining T cells comprising the first CAR and the second CAR;
administering an effective amount of the T cells comprising the first CAR and the second CAR to the subject; and
allowing the T cells comprising the first CAR and the second CAR to expand and/or to release one or more cytokines in the subject; wherein:
a binding domain of the first CAR binds a cell surface molecule of a white blood cell (WBC);
a binding domain of the second CAR binds a solid tumor antigen of the solid tumor, the solid tumor antigen being different from the cell surface molecule of the WBC, the T cell response in the subject comprises expansion of T cells or cytokine release in the subject, or a combination thereof; and
the T cell response in the subject is enhanced as compared to T cell response in a subject administered with T cells comprising the second CAR but not the first CAR.

21. The method of claim 20, wherein the T cell response comprises the expansion of T cells in the subject, and the expansion of the T cells in the subject comprises an increased copy numbers of the second CAR in genomic DNA of T cells in blood of the subject, as compared the expansion of T cells in the subject administered with T cells comprising the second CAR but not the first CAR.

22. The method of claim 20, wherein the T cell response in the subject comprises the cytokine release in the subject, and the cytokine release in the subject comprises an increased amount of the one or more cytokines released in blood of the subject, as compared the expansion of T cells in the subject administered with T cells comprising the second CAR but not the first CAR.

23. The method of claim 22, wherein the cytokine is IL-6 or IFN-γ.

24. The method of claim 20, wherein the cell surface molecule of the WBC antigen is CD 14, CD33, CD19, CD20, CD22, or BCMA.

25. The method of claim 20, wherein the first CAR comprises amino acid sequence SEQ ID NO: 5, 6, 53, 54, 55, 56, 57 or 58,

26. The method of claim 20, wherein the cell surface molecule of the WBC is CD19.

27. The method of claim 20, wherein the first CAR comprises amino acid sequence SEQ ID NO: 5 or 6.

28. The method of claim 20, wherein the solid tumor antigen is tMUC 1, PRLR, CLCA1, MUC12, GUCY2C, GPR35, CR1L, MUC 17, TMPRSS11B, MUC21, TMPRSS11E, CD207, SLC30A8, CFC1, SLC12A3, SSTR1, GPR27, FZD10, TSHR, SIGLEC15, SLC6A3, KISS1R, QRFPR, GPR119, CLDN6, UPK2, ADAM12, SLC45A3, ACPP, MUC21, MUC16, MS4A12, ALPP, CEA, EphA2, FAP, GPC3, IL13-Ra2, Mesothelin, PSMA, ROR1, VEGFR-II, GD2, FR-α, ErbB2, EpCAM, EGFRvIII, or EGFR.

29. The method of claim 28, wherein the cell surface molecule of the WBC is a B cell antigen, the B cell antigen being CD33, CD14, CD19, CD20, CD22, or BCMA.

30. The method of claim 20, wherein the solid tumor antigen comprises amino acid sequence SEQ ID NO: 19, 20, 21, 22, 23, 24, 108, 109, 110, 111, 112, 113, 114, 115, 116, 117, 118, 119, 120, 121, 122, or 123.

31. The method of claim 20, wherein the second CAR comprises amino acid sequence SEQ ID NO: 7, 8, 9, 10, 11, 12, 13, 14, 15, 16, 17, 71, or 72.

32. The method of claim 20, wherein the second CAR comprises amino acid sequence SEQ ID NO: 202 or 205.

33. The method of claim 20, wherein the T cells comprises nucleic acid sequence SEQ ID NO: 201, 204, 206, 208, 215, 217, 218, or 220.

34. The method claim 20, wherein the first CAR comprises an antigen binding domain, a transmembrane domain, a co-stimulatory domain, and a CD3 zeta domain; and the second CAR comprises an antigen binding domain, a transmembrane domain, a co-stimulatory domain, and a CD3 zeta domain.

35. The method of claim 34, wherein the co-stimulatory domain comprises the intracellular domain of CD27, CD28, 4-1BB, OX40, CD30, CD40, PD-1, ICOS, lymphocyte function-associated antigen-1 (LFA-1), CD2, CD7, LIGHT, NKG2C, B7-H3, a ligand that specifically binds CD83, or a combination thereof.

36. The method of claim 20, wherein the first CAR and the second CAR are expressed as separate polypeptides.

The application's sequence listing, which the Patent Office published only in electronic form, follows.

SEQUENCE LISTING (427 sequences)

SEQ ID NO: 1 - protein, 21 aa, Artificial Sequence
  Synthesized
MALPVTALLLPLALLLHAARP

SEQ ID NO: 2 - protein, 69 aa, Artificial Sequence
  Synthesized
AKPTTTPAPRPPTPAPTIASQPLSLRPEACRPAAGGAVHTRGLDFACDIYIWAPLAGTCGVLLLSLVIT

SEQ ID NO: 3 - protein, 42 aa, Artificial Sequence
  Synthesized
KRGRKKLLYIFKQPFMRPVQTTQEEDGCSCRFPEEEEGGCEL

SEQ ID NO: 4 - protein, 112 aa, Artificial Sequence
  Synthesized
RVKFSRSADAPAYKQGQNQLYNELNLGRREEYDVLDKRRGRDPEMGGKPRRKNPQEGLYNELQKDKMAEAYSEIGMKGERRRGKGHDGLYQGLSTATKDTYDALHMQALPPR

SEQ ID NO: 5 - protein, 242 aa, Artificial Sequence
  Synthesized
DIQMTQSPSSLSASVGDRVTITCRASQDISKYLNWYQQKPGKAPKLLIYHTSRLHSGVPSRFSGSGSGTDFTLTISSLQPEDFATYYCQQGNTLPYTFGQGTKVEIKGGGGSGGGGSGGGGSEVQLVESGGGLVQPGGSLRLSCAASGVSLPDYGVSWVRQAPGKGLEWVSVIWGSETTYYNSALKSRFTISRDNAKNSLYLQMNSLRAEDTAVYYCAKHYYYGGSYAMDYWGQGTLVTVSS

SEQ ID NO: 6 - protein, 242 aa, Artificial Sequence
  Synthesized
DIQMTQTTSSLSASLGDRVTISCRASQDISKYLNWYQQKPDGTVKLLIYHTSRLHSGVPSRFSGSGSGTDYSLTISNLEQEDIATYFCQQGNTLPYTFGGGTKLEITGGGGSGGGGSGGGGSEVKLQESGPGLVAPSQSLSVTCTVSGVSLPDYGVSWIRQPPRKGLEWLGVIWGSETTYYNSALKSRLTIIKDNSKSQVFLKMNSLQTDDTAIYYCAKHYYYGGSYAMDYWGQGTSVTVSS

SEQ ID NO: 7 - protein, 237 aa, Artificial Sequence
  Synthesized
DIQMTQSPASLSVSVGETVTITCRASENIYSNLAWYQQKQGKSPQLLVYVATNLADGVPSRFSGSGSGTQYSLKINSLQSEDFGSYYCQHFWGTPYTFGGGTKLGGGGSGGGGSGGGGSEVQLQQSGAELVKPGASVKLSCTASGFNINDTYMHWVKQRPEQGLEWIGRIDPANGNTKYDPKFQGKATITADTSSNTAYLQLSSLTSEDTAVYYCARGARGSRFAYWGQGTLVTVSA

SEQ ID NO: 8 - protein, 244 aa, Artificial Sequence
  Synthesized
QSVLTQPPSVSAAPGQKVTISCSGSSSDIGSNYVSWYQQFPGTAPKLLIYDNNKRPSAIPDRFSGSKSGTSATLGITGLQTGDEADYYCGTWDSRLGIAVFGGGTQLTVLGGGGSGGGGSGGGGSEVQLVQSGAEVKKPGQSLKISCKASGYSLTDNWIGWVRQKPGKGLEWMGIIYPGDSDTRYSPSFQGQVTISADKSINTAYLQWSSLKASDTAIYYCVGLDWNYNPLRYWGPGTLVTVSS

SEQ ID NO: 9 - protein, 252 aa, Artificial Sequence
  Synthesized
DIVLTQSPASLAVSLGQGATISCRASKSVSTSGYTYMHWYQQKPGQPPKLLIYLASNLESGVPARFSGSGSGTDFTLNIHPVEEEDAATYYCQHSGELPPSFGGGTKLEIKRAGGGGSGGGGSGGGGSEVQLVESGGDLVKPGGSLKLSCAVSGFTFSSYGMSWVRQTPDKRLEWVATVSSGGTYTYYPDSVKGRFTISRDNAKNTLYLQMSSLKSEDSAMYYCARHRGNYYATYYYAMDYWGQGTSVTVSS

SEQ ID NO: 10 - protein, 243 aa, Artificial Sequence
  Synthesized
DVQITQSPSYLAASPGETITINCRASKSISKYLAWYQEKPGKTNKLLIYSGSTLQSGIPSRFSGSGSGTDFTLTISSLEPEDFAMYYCQQHHEYPYTFGGGTKLEIKGGGGSGGGGSGGGGSQVQLQQPGAELVRPGASVKLSCKASGYTFTTYWMNWVKQRPEQGLEWIGRIDPYDSETHYNQKFKDKAILTVDKSSSTAYMQLSSLTSEDSAVYYCARGPYYGTNPWFPYWGQGTLVTVSS

SEQ ID NO: 11 - protein, 241 aa, Artificial Sequence
  Synthesized
EIVMTQSPATLSVSPGERATLSCRASQSVSRNLAWYQQKPGQAPRLLIYGASTRATGIPARFSGSGSGTEFTLTIGSLQSEDFAVYYCQQYKTWPRTFGQGTNVEIKGGGGSGGGGSGGGGSQVQLQQWGAGLLKPSETLSLTCAVFGGSFSGYYWSWIRQPPGKGLEWIGEINHRGNTNDNPSLKSRVTISVDTSKNQFALKLSSVTAADTAVYYCARERGYTYGNFDHWGQGTLVTVSS

SEQ ID NO: 12 - protein, 246 aa, Artificial Sequence
  Synthesized
DVVMTQTPLSLPVRLGDQASISCRSSQSLVHSNGNTYLHWYLQKPGQSPKLLIYKVSNRFSGVPDRFSGSGSGTNFTLKISRVEAEDLGLYFCSQSTHVPYTFGGGTKLEIKRAGGGGSGGGGSGGGGSQVQLRQSGPELVKPGASVKMSCKASGYTFTDYVISWVKQRTGQGLEWIGDIYPGSGYSFYNENFKGKATLTADKSSTTAYMQLSSLTSEDSAVYFCATYYNYPFAYWGQGTLVTVSA

SEQ ID NO: 13 - protein, 199 aa, Artificial Sequence
  Synthesized
LPICPGGAARCQVTLRDLFDRAVVLSHYIHNLSSEMFSEFDKRYTHGRGFITKAINSCHTSSLATPEDKEQAQQMNQKDFLSLIVSILRSWNEPLYHLVTEVRGMQEAPEAILSKAVEIEEQTKRLLEGMELIVSQVHPETKENEIYPVWSGLPSLQMADEESRLSAYYNLLHCLRRDSHKIDNYLKLLKCRIIHNNNC

SEQ ID NO: 14 - protein, 240 aa, Artificial Sequence
  Synthesized
DIVMTQSPDSLAVSLGERATINCKSSQSLLNSRTRKNYLAWYQQKPGQPPKLLIYWASTRESGVPDRFSGSGSGTDFTLTISSLQAEDVAVYYCTQSFILRTFGQGTKVEIKGGGGGSGGGGSGGGGSDIVMTQSPDSLAVSLGERATINCKSSQSLLNSRTRKNYLAWYQQKPGQPPKLLIYWASTRESGVPDRFSGSGSGTDFTLTISSLQAEDVAVYYCTQSFILRTFGQGTKVEIK

SEQ ID NO: 15 - protein, 281 aa, Artificial Sequence
  Synthesized
MNVPTQLLGLLLLWLTGGKCDIQMTQSPASLSASLEEIVTITCKASQAIDAYLSWYQQKPGKSPQLLIYDATSLADGVPSRFSGSRSGTQYSLKISRPQVDDSGIYYCLQSYSTPFTFGSGTKLEIKGGGGGSGGGGSGGGGSMAVLVLLLCLLIFPSCVLSQVQLKESGPGLVQPSQTLSLTCTVSGSSLTSNSVSWIRQPPGKGLEWMGVIWSNGDADYNSAIKSRLSISRDTSKSQVFLKMNSLQTEDTAMYFCASPYYGYYFPFDYWGQGVMVTVSS

SEQ ID NO: 16 - protein, 285 aa, Artificial Sequence
  Synthesized
METDTLLLWVLLLWVPGSTGDIVLTQSPALAVSLGQRATISCRASQSVSISSHDLMQWYQQKPGQQPKLLIYDAFNLASGIPVRFSGSGSGTDFTLTIDPVQADDIATYYCQQSKDDPYTFGAGTKLELKGGGGGSGGGGSGGGGSMDIRLSLAFLVLFIKGVQCEVQLVESGGGLVQPGRSMKLSCAASGFTFSNYGMAWVRQAPTKGLEWVATISYDGSITYYRDSVKGRFTISRDHAKSTLYLQMNSLRSEDTATYYCTREEQYSSWYFDFWGPGIMVTVSS

SEQ ID NO: 17 - protein, 242 aa, Artificial Sequence
  Synthesized
NIVMTQSPSSLSASVGDRVTITCQASQDVGTAVAWYQQKPDQSPKLLIYWTSTRHTGVPDRFTGSGSGTDFTLTISSLQPEDIATYFCHQYNSYNTFGSGTKLEIKGGGGGSGGGGSGGGGSQVTLKESGPVLVKPTETLTLTCTFSGFSLSTSGMGVGWIRQAPGKGLEWVAHIWWDDDVYYNPSLKSRLTITKDASKDQVSLKLSSVTAADTAVYYCVRRRATGTGFDYWGQGTLVTVSS

SEQ ID NO: 18 - protein, 272 aa, Homo sapiens
PEEPLVVKVEEGDNAVLQCLKGTSDGPTQQLTWSRESPLKPFLKLSLGLPGLGIHMRPLAIWLFIFNVSQQMGGFYLCQPGPPSEKAWQPGWTVNVEGSGELFRWNVSDLGGLGCGLKNRSSEGPSSPSGKLMSPKLYVWAKDRPEIWEGEPPCLPPRDSLNQSLSQDLTMAPGSTLWLSCGVPPDSVSRGPLSWTHVHPKGPKSLLSLELKDDRPARDMWVMETGLLLPRATAQDAGKYYCHRGNLTMSFHLEITARPVLWHWLLRTGGWK

SEQ ID NO: 19 - protein, 205 aa, Homo sapiens
ISSMDMERPGDGKCQPIEIPMCKDIGYNMTRMPNLMGHENQREAAIQLHEFAPLVEYGCHGHLRFFLCSLYAPMCTEQVSTPIPACRVMCEQARLKCSPIMEQFNFKWPDSLDCRKLPNKNDPNYLCMEAPNNGSDEPTRGSGLFPPLFRPQRPHSAQEHPLKDGGPGRGGCDNPGKFHHVEKSASCAPLCTPGVDVYWSREDKR

SEQ ID NO: 20 - protein, 393 aa, Homo sapiens
GMGCSSPPCECHQEEDFRVTCKDIQRIPSLPPSTQTLKLIETHLRTIPSHAFSNLPNISRIYVSIDVTLQQLESHSFYNLSKVTHIEIRNTRNLTYIDPDALKELPLLKFLGIFNTGLKMFPDLTKVYSTDIFFILEITDNPYMTSIPVNAFQGLCNETLTLKLYNNGFTSVQGYAFNGTKLDAVYLNKNKYLTVIDKDAFGGVYSGPSLLDVSQTSVTALPSKGLEHLKELIARNTWTLKKLPLSLSFLHLTRADLSYPSHCCAFKNQKKIRGILESLMCNESSMQSLRQRKSVNALNSPLHQEYEENLGDSIVGYKEKSKFQDTHNNAHYYVFFEEQEDEIIGFGQELKNPQEETLQAFDSHYDYTICGDSEDMVCTPKSDEFNPCEDIMG

SEQ ID NO: 21 - protein, 210 aa, Homo sapiens
QLPPGKPEIFKCRSPNKETFTCWWRPGTDGGLPTNYSLTYHREGETLMHECPDYITGGPNSCHFGKQYTSMWRTYIMMVNATNQMGSSFSDELYVDVTYIVQPDPPLELAVEVKQPEDRKPYLWIKWSPPTLIDLKTGWFTLLYEIRLKPEKAAEWEIHFAGQQTEFKILSLHPGQKYLVQVRCKPDHGYWSAWSPATFIQIPSDFTMND

SEQ ID NO: 22 - protein, 4368 aa, Homo sapiens
EQDLSVNRAVWDGGGCISQGDVLNRQCQQLSQHVRTGSAANTATGTTSTNVVEPRMYLSCSTNPEMTSIESSVTSDTPGVSSTRMTPTESRTTSESTSDSTTLFPSSTEDTSSPTTPEGTDVPMSTPSEESISSTMAFVSTAPLPSFEAYTSLTYKVDMSTPLTTSTQASSSPTTPESTTIPKSTNSEGSTPLTSMPASTMKVASSEAITLLTTPVEISTPVTISAQASSSPTTAEGPSLSNSAPSGGSTPLTRMPLSVMLVVSSEASTLSTTPAATNIPVITSTEASSSPTTAEGTSIPTSTYTEGSTPLTSTPASTMPVATSEMSTLSITPVDTSTLVTTSTEPSSLPTTAEATSMLTSTLSEGSTPLTNMPVSTILVASSEASTTSTIPVDSKTFVTTASEASSSPTTAEDTSIATSTPSEGSTPLTSMPVSTTPVASSEASNLSTTPVDSKTQVTTSTEASSSPPTAEVNSMPTSTPSEGSTPLTSMSVSTMPVASSEASTLSTTPVDTSTPVTTSSEASSSSTTPEGTSIPTSTPSEGSTPLTNMPVSTRLVVSSEASTTSTTPADSNTFVTTSSEASSSSTTAEGTSMPTSTYSERGTTITSMSVSTTLVASSEASTLSTTPVDSNTPVTTSTEATSSSTTAEGTSMPTSTYTEGSTPLTSMPVNTTLVASSEASTLSTTPVDTSTPVTTSTEASSSPTTADGASMPTSTPSEGSTPLTSMPVSKTLLTSSEASTLSTTPLDTSTHITTSTEASCSPTTTEGTSMPISTPSEGSPLLTSIPVSITPVTSPEASTLSTTPVDSNSPVTTSTEVSSSPTPAEGTSMPTSTYSEGRTPLTSMPVSTTLVATSAISTLSTTPVDTSTPVTNSTEARSSPTTSEGTSMPTSTPGEGSTPLTSMPDSTTPVVSSEARTLSATPVDTSTPVTTSTEATSSPTTAEGTSIPTSTPSEGTTPLTSTPVSHTLVANSEASTLSTTPVDSNTPLTTSTEASSPPPTAEGTSMPTSTPSEGSTPLTRMPVSTTMVASSETSTLSTTPADTSTPVTTYSQASSSSTTADGTSMPTSTYSEGSTPLTSVPVSTRLVVSSEASTLSTTPVDTSIPVTTSTEASSSPTTAEGTSIPTSPPSEGTTPLASMPVSTTLVVSSEANTLSTTPVDSKTQVATSTEASSPPPTAEVTSMPTSTPGERSTPLTSMPVRHTPVASSEASTLSTSPVDTSTPVTTSAETSSSPTTAEGTSLPTSTTSEGSTLLTSIPVSTTLVTSPEASTLLTTPVDTKGPVVTSNEVSSSPTPAEGTSMPTSTYSEGRTPLTSIPVNTTLVASSAISILSTTPVDNSTPVTTSTEACSSPTTSEGTSMPNSNPSEGTTPLTSIPVSTTPVVSSEASTLSATPVDTSTPGTTSAEATSSPTTAEGISIPTSTPSEGKTPLKSIPVSNTPVANSEASTLSTTPVDSNSPVVTSTAVSSSPTPAEGTSIAISTPSEGSTALTSIPVSTTTVASSEINSLSTTPAVTSTPVTTYSQASSSPTTADGTSMQTSTYSEGSTPLTSLPVSTMLVVSSEANTLSTTPIDSKTQVTASTEASSSTTAEGSSMTISTPSEGSPLLTSIPVSTTPVASPEASTLSTTPVDSNSPVITSTEVSSSPTPAEGTSMPTSTYTEGRTPLTSITVRTTPVASSAISTLSTTPVDNSTPVTTSTEARSSPTTSEGTSMPNSTPSEGTTPLTSIPVSTTPVLSSEASTLSATPIDTSTPVTTSTEATSSPTTAEGTSIPTSTLSEGMTPLTSTPVSHTLVANSEASTLSTTPVDSNSPVVTSTAVSSSPTPAEGTSIATSTPSEGSTALTSIPVSTTTVASSETNTLSTTPAVTSTPVTTYAQVSSSPTTADGSSMPTSTPREGRPPLTSIPVSTTTVASSEINTLSTTLADTRTPVTTYSQASSSPTTADGTSMPTPAYSEGSTPLTSMPLSTTLVVSSEASTLSTTPVDTSTPATTSTEGSSSPTTAGGTSIQTSTPSERTTPLAGMPVSTTLVVSSEGNTLSTTPVDSKTQVTNSTEASSSATAEGSSMTISAPSEGSPLLTSIPLSTTPVASPEASTLSTTPVDSNSPVITSTEVSSSPIPTEGTSMQTSTYSDRRTPLTSMPVSTTVVASSAISTLSTTPVDTSTPVTNSTEARSSPTTSEGTSMPTSTPSEGSTPFTSMPVSTMPVVTSEASTLSATPVDTSTPVTTSTEATSSPTTAEGTSIPTSTLSEGTTPLTSIPVSHTLVANSEVSTLSTTPVDSNTPFTTSTEASSPPPTAEGTSMPTSTSSEGNTPLTRMPVSTTMVASFETSTLSTTPADTSTPVTTYSQAGSSPTTADDTSMPTSTYSEGSTPLTSVPVSTMPVVSSEASTHSTTPVDTSTPVTTSTEASSSPTTAEGTSIPTSPPSEGTTPLASMPVSTTPVVSSEAGTLSTTPVDTSTPMTTSTEASSSPTTAEDIVVPISTASEGSTLLTSIPVSTTPVASPEASTLSTTPVDSNSPVVTSTEISSSATSAEGTSMPTSTYSEGSTPLRSMPVSTKPLASSEASTLSTTPVDTSIPVTTSTETSSSPTTAKDTSMPISTPSEVSTSLTSILVSTMPVASSEASTLSTTPVDTRTLVTTSTGTSSSPTTAEGSSMPTSTPGERSTPLTNILVSTTLLANSEASTLSTTPVDTSTPVTTSAEASSSPTTAEGTSMRISTPSDGSTPLTSILVSTLPVASSEASTVSTTAVDTSIPVTTSTEASSSPTTAEVTSMPTSTPSETSTPLTSMPVNHTPVASSEAGTLSTTPVDTSTPVTTSTKASSSPTTAEGIVVPISTASEGSTLLTSIPVSTTPVASSEASTLSTTPVDTSIPVTTSTEGSSSPTTAEGTSMPISTPSEVSTPLTSILVSTVPVAGSEASTLSTTPVDTRTPVTTSAEASSSPTTAEGTSMPISTPGERRTPLTSMSVSTMPVASSEASTLSRTPADTSTPVTTSTEASSSPTTAEGTGIPISTPSEGSTPLTSIPVSTTPVAIPEASTLSTTPVDSNSPVVTSTEVSSSPTPAEGTSMPISTYSEGSTPLTGVPVSTTPVTSSAISTLSTTPVDTSTPVTTSTEAHSSPTTSEGTSMPTSTPSEGSTPLTYMPVSTMLVVSSEDSTLSATPVDTSTPVTTSTEATSSTTAEGTSIPTSTPSEGMTPLTSVPVSNTPVASSEASILSTTPVDSNTPLTTSTEASSSPPTAEGTSMPTSTPSEGSTPLTSMPVSTTTVASSETSTLSTTPADTSTPVTTYSQASSSPPIADGTSMPTSTYSEGSTPLTNMSFSTTPVVSSEASTLSTTPVDTSTPVTTSTEASLSPTTAEGTSIPTSSPSEGTTPLASMPVSTTPVVSSEVNTLSTTPVDSNTLVTTSTEASSSPTIAEGTSLPTSTTSEGSTPLSIMPLSTTPVASSEASTLSTTPVDTSTPVTTSSPTNSSPTTAEVTSMPTSTAGEGSTPLTNMPVSTTPVASSEASTLSTTPVDSNTFVTSSSQASSSPATLQVTTMRMSTPSEGSSSLTTMLLSSTYVTSSEASTPSTPSVDRSTPVTTSTQSNSTPTPPEVITLPMSTPSEVSTPLTIMPVSTTSVTISEAGTASTLPVDTSTPVITSTQVSSSPVTPEGTTMPIWTPSEGSTPLTTMPVSTTRVTSSEGSTLSTPSVVTSTPVTTSTEAISSSATLDSTTMSVSMPMEISTLGTTILVSTTPVTRFPESSTPSIPSVYTSMSMTTASEGSSSPTTLEGTTTMPMSTTSERSTLLTTVLISPISVMSPSEASTLSTPPGDTSTPLLTSTKAGSFSIPAEVTTIRISITSERSTPLTTLLVSTTLPTSFPGASIASTPPLDTSTTFTPSTDTASTPTIPVATTISVSVITEGSTPGTTIFIPSTPVTSSTADVFPATTGAVSTPVITSTELNTPSTSSSSTTTSFSTTKEFTTPAMTTAAPLTYVTMSTAPSTPRTTSRGCTTSASTLSATSTPHTSTSVTTRPVTPSSESSRPSTITSHTIPPTFPPAHSSTPPTTSASSTTVNPEAVTTMTTRTKPSTRTTSFPTVTTTAVPTNTTIKSNPTSTPTVPRTTTCFGDGCQNTASRCKNGGTWDGLKCQCPNLYYGELCEEVVSSIDIGPPETISAQMELTVTVTSVKFTEELKNHSSQEFQEFKQTFTEQMNIVYSGIPEYVGVNITKLRLGSVVVEHDVLLRTKYTPEYKTVLDNATEVVKEKITKVTTQQIMINDICSDMMCFNTTGTQVQNITVTQYDPEEDCRKMAKEYGDYFVVEYRDQKPYCISPCEPGFSVSKNCNLGKCQMSLSGPQCLCVTTETHWYSGETCNQGTQKSLVYG

SEQ ID NO: 23 - protein, 407 aa, Homo sapiens
SQVSQNCHNGSYEISVLMMGNSAFAEPLKNLEDAVNEGLEIVRGRLQNAGLNVTVNATFMYSDGLIHNSGDCRSSTCEGLDLLRKISNAQRMGCVLIGPSCTYSTFQMYLDTELSYPMISAGSFGLSCDYKETLTRLMSPARKLMYFLVNFWKTNDLPFKTYSWSTSYVYKNGTETEDCFWYLNALEASVSYFSHELGFKVVLRQDKEFQDILMDHNRKSNVIIMCGGPEFLYKLKGDRAVAEDIVIILVDLFNDQYFEDNVTAPDYMKNVLVLTLSPGNSLLNSSFSRNLSPTKRDFALAYLNGILLFGHMLKIFLENGENITTPKFAHAFRNLTFEGYDGPVTLDDWGDVDSTMVLLYTSVDTKKYKVLLTYDTHVNKTYPVDMSPTFTWKNSKLPNDITGRGPQ

SEQ ID NO: 24 - protein, 264 aa, Homo sapiens
PRFMGTISDVKTNVQLLKGRVDNISTLDSEIKKNSDGMEAAGVQIQMVNESLGYVRSQFLKLKTSVEKANAQIQILTRSWEEVSTLNAQIPELKSDLEKASALNTKIRALQGSLENMSKLLKRQNDILQVVSQGWKYFKGNFYYFSLIPKTWYSAEQFCVSRNSHLTSVTSESEQEFLYKTAGGLIYWIGLTKAGMEGDWSWVDDTPFNKVQSVRFWIPGEPNNAGNNEHCGNIKAPSLQAWNDAPCDKTFLFICKRPYVPSEP

SEQ ID NO: 25 - protein, 100 aa, Homo sapiens
DGNEEMGGITQTPYKVSISGTTVILTCPQYPGSEILWQHNDKNIGGDEDDKNIGSDEDHLSLKEFSELEQSGYYVCYPRGSKPEDANFYLYLRARVCENC

SEQ ID NO: 26 - protein, 371 aa, Homo sapiens
KKVVLGKKGDTVELTCTASQKKSIQFHWKNSNQIKILGNQGSFLTKGPSKLNDRADSRRSLWDQGNFPLIIKNLKIEDSDTYICEVEDQKEEVQLLVFGLTANSDTHLLQGQSLTLTLESPPGSSPSVQCRSPRGKNIQGGKTLSVSQLELQDSGTWTCTVLQNQKKVEFKIDIVVLAFQKASSIVYKKEGEQVEFSFPLAFTVEKLTGSGELWWQAERASSSKSWITFDLKNKEVSVKRVTQDPKLQMGKKLPLHLTLPQALPQYAGSGNLTLALEAKTGKLHQEVNLVVMRATQLQKNLTCEVWGPTSPKLMLSLKLENKEAKVSKREKAVWVLNPEAGMWQCLLSDSGQVLLESNIKVLPTWSTPVQP

SEQ ID NO: 27 - protein, 348 aa, Homo sapiens
RLSWYDPDFQARLTRSNSKCQGQLEVYLKDGWHMVCSQSWGRSSKQWEDPSQASKVCQRLNCGVPLSLGPFLVTYTPQSSIICYGQLGSFSNCSHSRNDMCHSLGLTCLEPQKTTPPTTRPPPTTTPEPTAPPRLQLVAQSGGQHCAGVVEFYSGSLGGTISYEAQDKTQDLENFLCNNLQCGSFLKHLPETEAGRAQDPGEPREHQPLPIQWKIQNSSCTSLEHCFRKIKPQKSGRVLALLCSGFQPKVQSRLVGGSSICEGTVEVRQGAQWAALCDSSSARSSLRWEEVCREQQCGSVNSYRVLDAGDPTSRGLFCPHQKLSQCHELWERNSYCKKVFVTCQDPNP

SEQ ID NO: 28 - DNA, 7902 bp, Artificial Sequence
  Synthesized
gtcgacactagtaatcaacctctggattacaaaatttgtgaaagattgactggtattcttaactatgttgctccttttacgctatgtggatacgctgctttaatgcctttgtatcatgctattgcttcccgtatggctttcattttctcctccttgtataaatcctggttgctgtctctttatgaggagttgtggcccgttgtcaggcaacgtggcgtggtgtgcactgtgtttgctgacgcaacccccactggttggggcattgccaccacctgtcagctcctttccgggactttcgctttccccctccctattgccacggcggaactcatcgccgcctgccttgcccgctgctggacaggggctcggctgttgggcactgacaattccgtggtgttgtcggggaagctgacgtcctttccatggctgctcgcctgtgttgccacctggattctgcgcgggacgtccttctgctacgtcccttcggccctcaatccagcggaccttccttcccgcggcctgctgccggctctgcggcctcttccgcgtcttcgccttcgccctcagacgagtcggatctccctttgggccgcctccccgcctgccgcggaattcgagctcggtacctttaagaccaatgacttacaaggcagctgtagatcttagccactttttaaaagaaaaggggggactggaagggctaattcactcccaacgaagacaagatctgctttttgcttgtactgagtctctctggttagaccagatctgagcctgggagctctctggctaactagggaacccactgcttaagcctcaataaagcttgccttgagtgcttcaagtagtgtgtgcccgtctgttgtgtgactctggtaactagagatccctcagacccttttagtcagtgtggaaaatctctagcagtagtagttcatgtcatcttattattcagtatttataacttgcaaagaaatgaatatcagagagtgagaggaacttgtttattgcagcttataatggttacaaataaagcaatagcatcacaaatttcacaaataaagcatttttttcactgcattctagttgtggtttgtccaaactcatcaatgtatcttatcatgtctggctctagctatcccgcccctaactccgcccatcccgcccctaactccgcccagttccgcccattctccgccccatggctgactaattttttttatttatgcagaggccgaggccgcctcggcctctgagctattccagaagtagtgaggaggcttttttggaggcctagggacgtacccaattcgccctatagtgagtcgtattacgcgcgctcactggccgtcgttttacaacgtcgtgactgggaaaaccctggcgttacccaacttaatcgccttgcagcacatccccctttcgccagctggcgtaatagcgaagaggcccgcaccgatcgcccttcccaacagttgcgcagcctgaatggcgaatgggacgcgccctgtagcggcgcattaagcgcggcgggtgtggtggttacgcgcagcgtgaccgctacacttgccagcgccctagcgcccgctcctttcgctttcttcccttcctttctcgccacgttcgccggctttccccgtcaagctctaaatcgggggctccctttagggttccgatttagtgctttacggcacctcgaccccaaaaaacttgattagggtgatggttcacgtagtgggccatcgccctgatagacggtttttcgccctttgacgttggagtccacgttctttaatagtggactcttgttccaaactggaacaacactcaaccctatctcggtctattcttttgatttataagggattttgccgatttcggcctattggttaaaaaatgagctgatttaacaaaaatttaacgcgaattttaacaaaatattaacgcttacaatttaggtggcacttttcggggaaatgtgcgcggaacccctatttgtttatttttctaaatacattcaaatatgtatccgctcatgagacaataaccctgataaatgcttcaataatattgaaaaaggaagagtatgagtattcaacatttccgtgtcgcccttattcccttttttgcggcattttgccttcctgtttttgctcacccagaaacgctggtgaaagtaaaagatgctgaagatcagttgggtgcacgagtgggttacatcgaactggatctcaacagcggtaagatccttgagagttttcgccccgaagaacgttttccaatgatgagcacttttaaagttctgctatgtggcgcggtattatcccgtattgacgccgggcaagagcaactcggtcgccgcatacactattctcagaatgacttggttgagtactcaccagtcacagaaaagcatcttacggatggcatgacagtaagagaattatgcagtgctgccataaccatgagtgataacactgcggccaacttacttctgacaacgatcggaggaccgaaggagctaaccgcttttttgcacaacatgggggatcatgtaactcgccttgatcgttgggaaccggagctgaatgaagccataccaaacgacgagcgtgacaccacgatgcctgtagcaatggcaacaacgttgcgcaaactattaactggcgaactacttactctagcttcccggcaacaattaatagactggatggaggcggataaagttgcaggaccacttctgcgctcggcccttccggctggctggtttattgctgataaatctggagccggtgagcgtggctctcgcggtatcattgcagcactggggccagatggtaagccctcccgtatcgtagttatctacacgacggggagtcaggcaactatggatgaacgaaatagacagatcgctgagataggtgcctcactgattaagcattggtaactgtcagaccaagtttactcatatatactttagattgatttaaaacttcatttttaatttaaaaggatctaggtgaagatcctttttgataatctcatgaccaaaatcccttaacgtgagttttcgttccactgagcgtcagaccccgtagaaaagatcaaaggatcttcttgagatcctttttttctgcgcgtaatctgctgcttgcaaacaaaaaaaccaccgctaccagcggtggtttgtttgccggatcaagagctaccaactctttttccgaaggtaactggcttcagcagagcgcagataccaaatactgttcttctagtgtagccgtagttaggccaccacttcaagaactctgtagcaccgcctacatacctcgctctgctaatcctgttaccagtggctgctgccagtggcgataagtcgtgtcttaccgggttggactcaagacgatagttaccggataaggcgcagcggtcgggctgaacggggggttcgtgcacacagcccagcttggagcgaacgacctacaccgaactgagatacctacagcgtgagctatgagaaagcgccacgcttcccgaagggagaaaggcggacaggtatccggtaagcggcagggtcggaacaggagagcgcacgagggagcttccagggggaaacgcctggtatctttatagtcctgtcgggtttcgccacctctgacttgagcgtcgatttttgtgatgctcgtcaggggggcggagcctatggaaaaacgccagcaacgcggcctttttacggttcctggccttttgctggccttttgctcacatgttctttcctgcgttatcccctgattctgtggataaccgtattaccgcctttgagtgagctgataccgctcgccgcagccgaacgaccgagcgcagcgagtcagtgagcgaggaagcggaagagcgcccaatacgcaaaccgcctctccccgcgcgttggccgattcattaatgcagctggcacgacaggtttcccgactggaaagcgggcagtgagcgcaacgcaattaatgtgagttagctcactcattaggcaccccaggctttacactttatgcttccggctcgtatgttgtgtggaattgtgagcggataacaatttcacacaggaaacagctatgaccatgattacgccaagcgcgcaattaaccctcactaaagggaacaaaagctggagctgcaagcttaatgtagtcttatgcaatactcttgtagtcttgcaacatggtaacgatgagttagcaacatgccttacaaggagagaaaaagcaccgtgcatgccgattggtggaagtaaggtggtacgatcgtgccttattaggaaggcaacagacgggtctgacatggattggacgaaccactgaattgccgcattgcagagatattgtatttaagtgcctagctcgatacataaacggctctctctggttagaccagatctgagcctgggagctctctggctaactagggaacccactgcttaagcctcaataaagcttgccttgagtgcttcaagtagtgtgtgcccgtctgttgtgtgactctggtaactagagatccctcagacccttttagtcagtgtggaaaatctctagcagtggcgcccgaacagggacttgaaagcgaaagggaaaccagaggagctctctcgacgcaggactcggcttgctgaagcgcgcacggcaagaggcgaggggcggcgactggtgagtacgccaaaaattttgactagcggaggctagaaggagagagatgggtgcgagagcgtcagtattaagcgggggagaattagatcgcgatgggaaaaaattcggttaaggccagggggaaagaaaaaatataaattaaaacatatagtatgggcaagcagggagctagaacgattcgcagttaatcctggcctgttagaaacatcagaaggctgtagacaaatactgggacagctacaaccatcccttcagacaggatcagaagaacttagatcattatataatacagtagcaaccctctattgtgtgcatcaaaggatagagataaaagacaccaaggaagctttagacaagatagaggaagagcaaaacaaaagtaagaccaccgcacagcaagcggccgctgatcttcagacctggaggaggagatatgagggacaattggagaagtgaattatataaatataaagtagtaaaaattgaaccattaggagtagcacccaccaaggcaaagagaagagtggtgcagagagaaaaaagagcagtgggaataggagctttgttccttgggttcttgggagcagcaggaagcactatgggcgcagcgtcaatgacgctgacggtacaggccagacaattattgtctggtatagtgcagcagcagaacaatttgctgagggctattgaggcgcaacagcatctgttgcaactcacagtctggggcatcaagcagctccaggcaagaatcctggctgtggaaagatacctaaaggatcaacagctcctggggatttggggttgctctggaaaactcatttgcaccactgctgtgccttggaatgctagttggagtaataaatctctggaacagatttggaatcacacgacctggatggagtgggacagagaaattaacaattacacaagcttaatacactccttaattgaagaatcgcaaaaccagcaagaaaagaatgaacaagaattattggaattagataaatgggcaagtttgtggaattggtttaacataacaaattggctgtggtatataaaattattcataatgatagtaggaggcttggtaggtttaagaatagtttttgctgtactttctatagtgaatagagttaggcagggatattcaccattatcgtttcagacccacctcccaaccccgaggggacccgacaggcccgaaggaatagaagaagaaggtggagagagagacagagacagatccattcgattagtgaacggatctcgacggtatcgatcacgagactagcctcgacacaaatggcagtattcatccacaattttaaaagaaaaggggggattggggggtacagtgcaggggaaagaatagtagacataatagcaacagacatacaaactaaagaattacaaaaacaaattacaaaaattcaaaattttcgggtttattacagggacagcagaaatccactttggctcgagaagcttgatatcggctccggtgcccgtcagtgggcagagcgcacatcgcccacagtccccgagaagttggggggaggggtcggcaattgaaccggtgcctagagaaggtggcgcggggtaaactgggaaagtgatgtcgtgtactggctccgcctttttcccgagggtgggggagaaccgtatataagtgcagtagtcgccgtgaacgttctttttcgcaacgggtttgccgccagaacacaggatccgccaccatggccttaccagtgaccgccttgctcctgccgctggccttgctgctccacgccgccaggccggatatccagatgacccagagcccgagcagcctgagcgcgagcgtgggtgatcgcgtgaccattacctgcagggcaagtcaggacattagtaaatatttaaattggtatcagcagaaaccgggtaaagcgccgaaactgttaatttatcatacatcaagattacactcaggcgtgccgtcgcgttttagcggctcgggttcgggcaccgattttaccctgaccatctcgagcttgcagccggaggacttcgccacctactattgccaacagggtaatacgcttccgtacacgttcggtcagggcaccaaagtggagatcaaaggtggcggtggctcgggcggtggtgggtcgggtggcggcggatctgaggtgcagctggtggagtctgggggaggcttggtacagcctggggggtccctgagactctcctgtgcagcctctggagtgtccctgcctgattatggcgtgtcctgggtccgccaggctccagggaaggggctggagtgggtttcagtgatctggggcagcgagacaacctactacaacagcgccctgaagtcccgattcaccatctccagagacaatgccaagaactcactgtatctgcaaatgaacagcctgagagccgaggacacggctgtgtattactgtgcgaagcactactactacggcggcagctacgctatggactactggggccaaggaaccctggtcaccgtgtcctcaaccacgacgccagcgccgcgaccaccaacaccggcgcccaccatcgcgtcgcagcccctgtccctgcgcccagaggcgtgccggccagcggcggggggcgcagtgcacacgagggggctggacttcgcctgtgatatctacatctgggcgcccttggccgggacttgtggggtccttctcctgtcactggttatcaccctttactgcaaacggggcagaaagaaactcctgtatatattcaaacaaccatttatgagaccagtacaaactactcaagaggaagatggctgtagctgccgatttccagaagaagaagaaggaggatgtgaactgagagtgaagttcagcaggagcgcagacgcccccgcgtacaagcagggccagaaccagctctataacgagctcaatctaggacgaagagaggagtacgatgttttggacaagaggcgtggccgggaccctgagatggggggaaagccgagaaggaagaaccctcaggaaggcctgtacaatgaactgcagaaagataagatggcggaggcctacagtgagattgggatgaaaggcgagcgccggaggggcaaggggcacgatggcctttaccagggtctcagtacagccaccaaggacacctacgacgcccttcacatgcaggccctgccccctcgctaatctagaggcgcgcc

SEQ ID NO: 29 - protein, 66 aa, Artificial Sequence
  Synthesized
TTTPAPRPPTPAPTIASQPLSLRPEACRPAAGGAVHTRGLDFACDIYIWAPLAGTCGVLLLSLVIT

SEQ ID NO: 30 - protein, 69 aa, Artificial Sequence
  Synthesized
TTTPAPRPPTPAPTIASQPLSLRPEACRPAAGGAVHTRGLDFACDIYIWAPLAGTCGVLLLSLVITLYC

SEQ ID NO: 31 - protein, 72 aa, Artificial Sequence
  Synthesized
AKPTTTPAPRPPTPAPTIASQPLSLRPEACRPAAGGAVHTRGLDFACDIYIWAPLAGTCGVLLLSLVITLYC

SEQ ID NO: 32 - protein, 69 aa, Artificial Sequence; identical to SEQ ID NO: 2
  Synthesized

SEQ ID NO: 33 - protein, 50 aa, Artificial Sequence
  Synthesized
AKPTTTPAPRPPTPAPTIASQPLSLRPEACRPAAGGAVHTRGLDFACDIY

SEQ ID NO: 34 - protein, 50 aa, Artificial Sequence; identical to SEQ ID NO: 33
  Synthesized

SEQ ID NO: 35 - protein, 47 aa, Artificial Sequence
  Synthesized
TTTPAPRPPTPAPTIASQPLSLRPEACRPAAGGAVHTRGLDFACDIY

SEQ ID NO: 36 - protein, 47 aa, Artificial Sequence; identical to SEQ ID NO: 35
  Synthesized

SEQ ID NO: 37 - protein, 22 aa, Artificial Sequence
  Synthesized
IWAPLAGTCGVLLLSLVITLYC

SEQ ID NO: 38 - protein, 22 aa, Artificial Sequence
  Synthesized
IWAPLAGTCGVLLLSLVITLYC

SEQ ID NO: 39 - protein, 270 aa, Artificial Sequence
  Synthesized
PEEPLVVKVEEGDNAVLQCLKGTSDGPTQQLTWSRESPLKPFLKLSLGLPGLGIHMRPLAIWLFIFNVSQQMGGFYLCQPGPPSEKAWQPGWTVNVEGSGELFRWNVSDLGGLGCGLKNRSSEGPSSPSGKLMSPKLYVWAKDRPEIWEGEPPCLPPRDSLNQSLSQDLTMAPGSTLWLSCGVPPDSVSRGPLSWTHVHPKGPKSLLSLELKDDRPARDMWVMETGLLLPRATAQDAGKYYCHRGNLTMSFHLEITARPVLWHWLLRTGG

SEQ ID NO: 40 - protein, 19 aa, Artificial Sequence
  Synthesized
IWAPLAGTCGVLLLSLVIT

SEQ ID NO: 41 - DNA, 339 bp, Artificial Sequence
  Synthesized
agagtgaagttcagcaggagcgcagacgcccccgcgtaccagcagggccagaaccagctctataacgagctcaatctaggacgaagagaggagtacgatgttttggacaagaggcgtggccgggaccctgagatggggggaaagccgagaaggaagaaccctcaggaaggcctgtacaatgaactgcagaaagataagatggcggaggcctacagtgagattgggatgaaaggcgagcgccggaggggcaaggggcacgatggcctttaccagggtctcagtacagccaccaaggacacctacgacgcccttcacatgcaggccctgccccctcgctaa

SEQ ID NO: 42 - DNA, 1689 bp, Artificial Sequence
  Synthesized
cggctccggtgcccgtcagtgggcagagcgcacatcgcccacagtccccgagaagttggggggaggggtcggcaattgaaccggtgcctagagaaggtggcgcggggtaaactgggaaagtgatgtcgtgtactggctccgcctttttcccgagggtgggggagaaccgtatataagtgcagtagtcgccgtgaacgttctttttcgcaacgggtttgccgccagaacacaggatccgccaccatggccttaccagtgaccgccttgctcctgccgctggccttgctgctccacgccgccaggccggacatccagctcacccagtccccgagctcgctgtccgcctccgtgggagatcgggtcaccatcacgtgccgcgccagccagtcgatttcctcctacctgaactggtaccaacagaagcccggaaaagccccgaagcttctcatctacgccgcctcgagcctgcagtcaggagtgccctcacggttctccggctccggttccggtactgatttcaccctgaccatttcctccctgcaaccggaggacttcgctacttactactgccagcagtcgtactccaccccctacactttcggacaaggcaccaaggtcgaaatcaagggtggcggtggctcgggcggtggtgggtcgggtggcggcggatctgaagtgcaattggtggaatcagggggaggacttgtgcagcctggaggatcgctgagactgtcatgtgccgtgtccggctttgccctgtccaaccacgggatgtcctgggtccgccgcgcgcctggaaagggcctcgaatgggtgtcgggtattgtgtacagcggtagcacctactatgccgcatccgtgaaggggagattcaccatcagccgggacaactccaggaacactctgtacctccaaatgaattcgctgaggccagaggacactgccatctactactgctccgcgcatggcggagagtccgacgtctggggacaggggaccaccgtgaccgtgtctagcaccacgacgccagcgccgcgaccaccaacaccggcgcccaccatcgcgtcgcagcccctgtccctgcgcccagaggcgtgccggccagcggcggggggcgcagtgcacacgagggggctggacttcgcctgtgatatctacatctgggcgcccttggccgggacttgtggggtccttctcctgtcactggttatcaccctttactgcaaacggggcagaaagaaactcctgtatatattcaaacaaccatttatgagaccagtacaaactactcaagaggaagatggctgtagctgccgatttccagaagaagaagaaggaggatgtgaactgagagtgaagttcagcaggagcgcagacgcccccgcgtaccagcagggccagaaccagctctataacgagctcaatctaggacgaagagaggagtacgatgttttggacaagaggcgtggccgggaccctgagatggggggaaagccgagaaggaagaaccctcaggaaggcctgtacaatgaactgcagaaagataagatggcggaggcctacagtgagattgggatgaaaggcgagcgccggaggggcaaggggcacgatggcctttaccagggtctcagtacagccaccaaggacacctacgacgcccttcacatgcaggccctgccccctcgctaa

SEQ ID NO: 43 - DNA, 1689 bp, Homo sapiens
cggctccggtgcccgtcagtgggcagagcgcacatcgcccacagtccccgagaagttggggggaggggtcggcaattgaaccggtgcctagagaaggtggcgcggggtaaactgggaaagtgatgtcgtgtactggctccgcctttttcccgagggtgggggagaaccgtatataagtgcagtagtcgccgtgaacgttctttttcgcaacgggtttgccgccagaacacaggatccgccaccatggccttaccagtgaccgccttgctcctgccgctggccttgctgctccacgccgccaggccggacatccagctcacccagtccccgagctcgctgtccgcctccgtgggagatcgggtcaccatcacgtgccgcgccagccagtcgatttcctcctacctgaactggtaccaacagaagcccggaaaagccccgaagcttctcatctacgccgcctcgagcctgcagtcaggagtgccctcacggttctccggctccggttccggtactgatttcaccctgaccatttcctccctgcaaccggaggacttcgctacttactactgccagcagtcgtactccaccccctacactttcggacaaggcaccaaggtcgaaatcaagggtggcggtggctcgggcggtggtgggtcgggtggcggcggatctgaagtgcaattggtggaatcagggggaggacttgtgcagcctggaggatcgctgagactgtcatgtgccgtgtccggctttgccctgtccaaccacgggatgtcctgggtccgccgcgcgcctggaaagggcctcgaatgggtgtcgggtattgtgtacagcggtagcacctactatgccgcatccgtgaaggggagattcaccatcagccgggacaactccaggaacactctgtacctccaaatgaattcgctgaggccagaggacactgccatctactactgctccgcgcatggcggagagtccgacgtctggggacaggggaccaccgtgaccgtgtctagcaccacgacgccagcgccgcgaccaccaacaccggcgcccaccatcgcgtcgcagcccctgtccctgcgcccagaggcgtgccggccagcggcggggggcgcagtgcacacgagggggctggacttcgcctgtgatatctacatctgggcgcccttggccgggacttgtggggtccttctcctgtcactggttatcaccctttactgcaaacggggcagaaagaaactcctgtatatattcaaacaaccatttatgagaccagtacaaactactcaagaggaagatggctgtagctgccgatttccagaagaagaagaaggaggatgtgaactgagagtgaagttcagcaggagcgcagacgcccccgcgtacaagcagggccagaaccagctctataacgagctcaatctaggacgaagagaggagtacgatgttttggacaagaggcgtggccgggaccctgagatggggggaaagccgagaaggaagaaccctcaggaaggcctgtacaatgaactgcagaaagataagatggcggaggcctacagtgagattgggatgaaaggcgagcgccggaggggcaaggggcacgatggcctttaccagggtctcagtacagccaccaaggacacctacgacgcccttcacatgcaggccctgccccctcgctaa

SEQ ID NO: 44 - DNA, 1689 bp, Artificial Sequence; identical to SEQ ID NO: 42
  Synthesized

SEQ ID NO: 45 - DNA, 1689 bp, Artificial Sequence; identical to SEQ ID NO: 43
  Synthesized

SEQ ID NO: 46 - protein, 106 aa, Artificial Sequence
  Synthesized
NIVMTQSPSSLSASVGDRVTITCQASQDVGTAVAWYQQKPDQSPKLLIYWTSTRHTGVPDRFTGSGSGTDFTLTISSLQPEDIATYFCHQYNSYNTFGSGTKLEIK

SEQ ID NO: 47 - protein, 120 aa, Artificial Sequence
  Synthesized
QVTLKESGPVLVKPTETLTLTCTFSGFSLSTSGMGVGWIRQAPGKGLEWVAHIWWDDDVYYNPSLKSRLTITKDASKDQVSLKLSSVTAADTAVYYCVRRRATGTGFDYWGQGTLVTVSS

SEQ ID NO: 48 - protein, 130 aa, Artificial Sequence
  Synthesized
METDTLLLWVLLLWVPGSTGDIVLTQSPALAVSLGQRATISCRASQSVSISSHDLMQWYQQKPGQQPKLLIYDAFNLASGIPVRFSGSGSGTDFTLTIDPVQADDIATYYCQQSKDDPYTFGAGTKLELK

SEQ ID NO: 49 - protein, 139 aa, Artificial Sequence
  Synthesized
MDIRLSLAFLVLFIKGVQCEVQLVESGGGLVQPGRSMKLSCAASGFTFSNYGMAWVRQAPTKGLEWVATISYDGSITYYRDSVKGRFTISRDHAKSTLYLQMNSLRSEDTATYYCTREEQYSSWYFDFWGPGIMVTVSS

SEQ ID NO: 50 - protein, 112 aa, Artificial Sequence
  Synthesized
DIVMTQSPDSLAVSLGERATINCKSSQSLLNSRTRKNYLAWYQQKPGQPPKLLIYWASTRESGVPDRFSGSGSGTDFTLTISSLQAEDVAVYYCTQSFILRTFGQGTKVEIK

SEQ ID NO: 51 - protein, 119 aa, Artificial Sequence
  Synthesized
EVQLVQSGAEVKKPGASVKVSCKASGYTFTNYYIHWVRQAPGQGLEWIGWIYPGDGNTKYNEKFKGRATLTADTSTSTAYLELSSLRSEDTAVYYCARDSYSNYYFDYWGQGTLVTVSS

SEQ ID NO: 52 - protein, 413 aa, Artificial Sequence
  Synthesized
MRPADLLQLVLLLDLPRDLGGMGCSSPPCECHQEEDFRVTCKDIQRIPSLPPSTQTLKLIETHLRTIPSHAFSNLPNISRIYVSIDVTLQQLESHSFYNLSKVTHIEIRNTRNLTYIDPDALKELPLLKFLGIFNTGLKMFPDLTKVYSTDIFFILEITDNPYMTSIPVNAFQGLCNETLTLKLYNNGFTSVQGYAFNGTKLDAVYLNKNKYLTVIDKDAFGGVYSGPSLLDVSQTSVTALPSKGLEHLKELIARNTWTLKKLPLSLSFLHLTRADLSYPSHCCAFKNQKKIRGILESLMCNESSMQSLRQRKSVNALNSPLHQEYEENLGDSIVGYKEKSKFQDTHNNAHYYVFFEEQEDEIIGFGQELKNPQEETLQAFDSHYDYTICGDSEDMVCTPKSDEFNPCEDIMG

SEQ ID NO: 53 - protein, 115 aa, Artificial Sequence
  Synthesized
EVQLLESGGGLVQPGGSLRLSCAASGFTFSSYAMNWVRQAPGKGLEWVSAILSSGGSTYYADSVKGRFTISRDNSKNTLYLQMNSLRAEDTAVYYCARYWPMDIWGQGTLVTVSS

SEQ ID NO: 54 - protein, 108 aa, Artificial Sequence
  Synthesized
EIVLTQSPGTLSLSPGERATLSCRGGQSVSSSYLAWYQQKPGQAPRLLMYDASIRATGIPDRFSGSGSGTDFTLTISRLEPEDFAVYYCQQYQSWPLTFGQGTKVEIK

SEQ ID NO: 55 - protein, 140 aa, Artificial Sequence
  Synthesized
MGWSCIILFLVATATGVHSEVQLVESGGGLMQPKGSLKLSCAASGFTFKTYALNWVRQAPGTGLEWVARIRSKSNNYTTYYADSVKDRFTISRDDSQNMLYLQMNNLKTEDTAMYYCVRPQSGTSFAYWGQGTLVTVSAA

SEQ ID NO: 56 - protein, 131 aa, Artificial Sequence
  Synthesized
MGWSCIILFLVATATGVHSNIVLTQSPASLAVSLGQRATISCRASESVDSYGNSFMHWYQQKPGQPPKLLIYLASNLESGVPARFSGSGSRTDFTLTIDPVEADDVATYYCQQNNGDPYTFGGGTKLEIIR

SEQ ID NO: 57 - protein, 120 aa, Artificial Sequence
  Synthesized
QVQLVQSGGGVVQPGKSLRLSCAASGFTFSIFAMHWVRQAPGKGLEWVATISYDGSNAFYADSVEGRFTISRDNSKDSLYLQMDSLRPEDTAVYYCVKAGDGGYDVFDSWGQGTLVTVSS

SEQ ID NO: 58 - protein, 111 aa, Artificial Sequence
  Synthesized
EIVMTQSPLSLPVTPGEPASISCRSSQSLLHSNGYNYLDWYLQKPGQSPQLLIYLGSNRASGVPDRFSGSGSGTDFTLKISRVEAEDVGVYYCMQALQTPTFGPGTKVDIK

SEQ ID NO: 59 - DNA, 1473 bp, Artificial Sequence
  Synthesized
atggccttaccagtgaccgccttgctcctgccgctggccttgctgctccacgccgccaggccggatatccagatgacccagagcccaagctccctgtccgcctctgtgggcgacagggtgaccatcacatgccgcgccagccagacaatctggtcctacctgaactggtatcagcagagacccggcaaggcccctaatctgctgatctacgcagcatctagcctgcagtctggagtgccctcccggttctctggaagaggatccggaaccgacttcaccctgacaatctcctctctgcaggccgaggacttcgccacatactattgccagcagagctattccatccctcagacctttggccagggcacaaagctggagatcaagggcggcggcggctctggaggaggaggaagcggaggaggaggatcccaggtgcagctgcagcagagcggaccaggactggtgaagccctcccagaccctgtctctgacatgtgccatcagcggcgattccgtgagctccaacagcgccgcctggaattggatccggcagtctcccagcagaggactggagtggctgggaaggacctactatcgctccaagtggtacaacgattatgccgtgtctgtgaagagccggatcaccatcaaccctgacacatctaagaatcagttcagcctgcagctgaattccgtgaccccagaggacacagccgtgtactattgtgcaagggaggtgaccggcgacctggaggatgcctttgacatctggggccagggcaccatggtgacagtgtctagcaccacgacgccagcgccgcgaccaccaacaccggcgcccaccatcgcgtcgcagcccctgtccctgcgcccagaggcgtgccggccagcggcggggggcgcagtgcacacgagggggctggacttcgcctgtgatatctacatctgggcgcccttggccgggacttgtggggtccttctcctgtcactggttatcaccctttactgcaaacggggcagaaagaaactcctgtatatattcaaacaaccatttatgagaccagtacaaactactcaagaggaagatggctgtagctgccgatttccagaagaagaagaaggaggatgtgaactgagagtgaagttcagcaggagcgcagacgcccccgcgtacaagcagggccagaaccagctctataacgagctcaatctaggacgaagagaggagtacgatgttttggacaagaggcgtggccgggaccctgagatggggggaaagccgagaaggaagaaccctcaggaaggcctgtacaatgaactgcagaaagataagatggcggaggcctacagtgagattgggatgaaaggcgagcgccggaggggcaaggggcacgatggcctttaccagggtctcagtacagccaccaaggacacctacgacgcccttcacatgcaggccctgccccctcgctaa

SEQ ID NO: 60 - DNA, 1446 bp, Artificial Sequence
  Synthesized
atggccttaccagtgaccgccttgctcctgccgctggccttgctgctccacgccgccaggccggacatccagctcacccagtccccgagctcgctgtccgcctccgtgggagatcgggtcaccatcacgtgccgcgccagccagtcgatttcctcctacctgaactggtaccaacagaagcccggaaaagccccgaagcttctcatctacgccgcctcgagcctgcagtcaggagtgccctcacggttctccggctccggttccggtactgatttcaccctgaccatttcctccctgcaaccggaggacttcgctacttactactgccagcagtcgtactccaccccctacactttcggacaaggcaccaaggtcgaaatcaagggtggcggtggctcgggcggtggtgggtcgggtggcggcggatctgaagtgcaattggtggaatcagggggaggacttgtgcagcctggaggatcgctgagactgtcatgtgccgtgtccggctttgccctgtccaaccacgggatgtcctgggtccgccgcgcgcctggaaagggcctcgaatgggtgtcgggtattgtgtacagcggtagcacctactatgccgcatccgtgaaggggagattcaccatcagccgggacaactccaggaacactctgtacctccaaatgaattcgctgaggccagaggacactgccatctactactgctccgcgcatggcggagagtccgacgtctggggacaggggaccaccgtgaccgtgtctagcaccacgacgccagcgccgcgaccaccaacaccggcgcccaccatcgcgtcgcagcccctgtccctgcgcccagaggcgtgccggccagcggcggggggcgcagtgcacacgagggggctggacttcgcctgtgatatctacatctgggcgcccttggccgggacttgtggggtccttctcctgtcactggttatcaccctttactgcaaacggggcagaaagaaactcctgtatatattcaaacaaccatttatgagaccagtacaaactactcaagaggaagatggctgtagctgccgatttccagaagaagaagaaggaggatgtgaactgagagtgaagttcagcaggagcgcagacgcccccgcgtacaagcagggccagaaccagctctataacgagctcaatctaggacgaagagaggagtacgatgttttggacaagaggcgtggccgggaccctgagatggggggaaagccgagaaggaagaaccctcaggaaggcctgtacaatgaactgcagaaagataagatggcggaggcctacagtgagattgggatgaaaggcgagcgccggaggggcaaggggcacgatggcctttaccagggtctcagtacagccaccaaggacacctacgacgcccttcacatgcaggccctgccccctcgctaa

SEQ ID NO: 61 - DNA, 1467 bp, Artificial Sequence
  Synthesized
atggccttaccagtgaccgccttgctcctgccgctggccttgctgctccacgccgccaggccggacatcgtgatgacccagtccccctccagcctgacagtgacagccggcgagaaggtgacaatgatctgtaagtccagccagagcctgctgaacagcggcgaccagaagaactacctgacctggtaccagcagaagcctggccagccccccaagctgctgatcttctgggccagcacaagggagagcggcgtgcccgacagattcacaggcagcggcagcggcaccgacttcacactgaccatttcctccgtgcaggccgaggacctcgccgtgtactactgccagaacgactactcctaccccctgacattcggcgccggcaccaaactggagctgaagggtggcggtggctcgggcggtggtgggtcgggtggcggcggatctcaggtgcagctccagcagtccgatgccgagctggtgaagcccggaagcagcgtcaagatcagctgtaaggcctccggctacaccttcacagaccacgccatccactgggtgaagcagaagcccgagcagggcctggagtggatcggccactttagccccggaaacaccgacatcaagtacaacgacaagttcaagggcaaggccaccctgaccgtggacaggagcagcagcaccgcctacatgcagctgaacagcctgacaagcgaggacagcgccgtgtacttctgcaagacctccaccttcttcttcgactactggggccagggaaccaccctgacagtgtccagcaccacgacgccagcgccgcgaccaccaacaccggcgcccaccatcgcgtcgcagcccctgtccctgcgcccagaggcgtgccggccagcggcggggggcgcagtgcacacgagggggctggacttcgcctgtgatatctacatctgggcgcccttggccgggacttgtggggtccttctcctgtcactggttatcaccctttactgcaaacggggcagaaagaaactcctgtatatattcaaacaaccatttatgagaccagtacaaactactcaagaggaagatggctgtagctgccgatttccagaagaagaagaaggaggatgtgaactgagagtgaagttcagcaggagcgcagacgcccccgcgtacaagcagggccagaaccagctctataacgagctcaatctaggacgaagagaggagtacgatgttttggacaagaggcgtggccgggaccctgagatggggggaaagccgagaaggaagaaccctcaggaaggcctgtacaatgaactgcagaaagataagatggcggaggcctacagtgagattgggatgaaaggcgagcgccggaggggcaaggggcacgatggcctttaccagggtctcagtacagccaccaaggacacctacgacgcccttcacatgcaggccctgccccctcgctaa

SEQ ID NO: 62 - DNA, 3533 bp, Artificial Sequence
  Synthesized
atggccttaccagtgaccgccttgctcctgccgctggccttgctgctccacgccgccaggccggacatccagatgacacagactacatcctccctgtctgcctctctgggagacagagtcaccatcagttgcagggcaagtcaggacattagtaaatatttaaattggtatcagcagaaaccagatggaactgttaaactcctgatctaccatacatcaagattacactcaggagtcccatcaaggttcagtggcagtgggtctggaacagattattctctcaccattagcaacctggagcaagaagatattgccacttacttttgccaacagggtaatacgcttccgtacacgttcggaggggggaccaagctggagatcacaggtggcggtggctcgggcggtggtgggtcgggtggcggcggatctgaggtgaaactgcaggagtcaggacctggcctggtggcgccctcacagagcctgtccgtcacatgcactgtctcaggggtctcattacccgactatggtgtaagctggattcgccagcctccacgaaagggtctggagtggctgggagtaatatggggtagtgaaaccacatactataattcagctctcaaatccagactgaccatcatcaaggacaactccaagagccaagttttcttaaaaatgaacagtctgcaaactgatgacacagccatttactactgtgccaaacattattactacggtggtagctatgctatggactactggggccaaggaacctcagtcaccgtctcctcaaccacgacgccagcgccgcgaccaccaacaccggcgcccaccatcgcgtcgcagcccctgtccctgcgcccagaggcgtgccggccagcggcggggggcgcagtgcacacgagggggctggacttcgcctgtgatatctacatctgggcgcccttggccgggacttgtggggtccttctcctgtcactggttatcaccctttactgcaaacggggcagaaagaaactcctgtatatattcaaacaaccatttatgagaccagtacaaactactcaagaggaagatggctgtagctgccgatttccagaagaagaagaaggaggatgtgaactgagagtgaagttcagcaggagcgcagacgcccccgcgtacaagcagggccagaaccagctctataacgagctcaatctaggacgaagagaggagtacgatgttttggacaagaggcgtggccgggaccctgagatggggggaaagccgagaaggaagaaccctcaggaaggcctgtacaatgaactgcagaaagataagatggcggaggcctacagtgagattgggatgaaaggcgagcgccggaggggcaaggggcacgatggcctttaccagggtctcagtacagccaccaaggacacctacgacgcccttcacatgcaggccctgccccctcgctaatctagaggcgcgcccctctccctcccccccccctaacgttactggccgaagccgcttggaataaggccggtgtgcgtttgtctatatgttattttccaccatattgccgtcttttggcaatgtgagggcccggaaacctggccctgtcttcttgacgagcattcctaggggtctttcccctctcgccaaaggaatgcaaggtctgttgaatgtcgtgaaggaagcagttcctctggaagcttcttgaagacaaacaacgtctgtagcgaccctttgcaggcagcggaaccccccacctggcgacaggtgcctctgcggccaaaagccacgtgtataagatacacctgcaaaggcggcacaaccccagtgccacgttgtgagttggatagttgtggaaagagtcaaatggctctcctcaagcgtattcaacaaggggctgaaggatgcccagaaggtaccccattgtatgggatctgatctggggcctcggtacacatgctttacatgtgtttagtcgaggttaaaaaaacgtctaggccccccgaaccacggggacgtggttttcctttgaaaaacacgatgataatatggccacaacccatatgatggccttaccagtgaccgccttgctcctgccgctggccttgctgctccacgccgccaggccggacatcgtgatgacccagtccccctccagcctgacagtgacagccggcgagaaggtgacaatgatctgtaagtccagccagagcctgctgaacagcggcgaccagaagaactacctgacctggtaccagcagaagcctggccagccccccaagctgctgatcttctgggccagcacaagggagagcggcgtgcccgacagattcacaggcagcggcagcggcaccgacttcacactgaccatttcctccgtgcaggccgaggacctcgccgtgtactactgccagaacgactactcctaccccctgacattcggcgccggcaccaaactggagctgaagggtggcggtggctcgggcggtggtgggtcgggtggcggcggatctcaggtgcagctccagcagtccgatgccgagctggtgaagcccggaagcagcgtcaagatcagctgtaaggcctccggctacaccttcacagaccacgccatccactgggtgaagcagaagcccgagcagggcctggagtggatcggccactttagccccggaaacaccgacatcaagtacaacgacaagttcaagggcaaggccaccctgaccgtggacaggagcagcagcaccgcctacatgcagctgaacagcctgacaagcgaggacagcgccgtgtacttctgcaagacctccaccttcttcttcgactactggggccagggaaccaccctgacagtgtccagcaccacgacgccagcgccgcgaccaccaacaccggcgcccaccatcgcgtcgcagcccctgtccctgcgcccagaggcgtgccggccagcggcggggggcgcagtgcacacgagggggctggacttcgcctgtgatatctacatctgggcgcccttggccgggacttgtggggtccttctcctgtcactggttatcaccctttactgcaaacggggcagaaagaaactcctgtatatattcaaacaaccatttatgagaccagtacaaactactcaagaggaagatggctgtagctgccgatttccagaagaagaagaaggaggatgtgaactgagagtgaagttcagcaggagcgcagacgcccccgcgtacaagcagggccagaaccagctctataacgagctcaatctaggacgaagagaggagtacgatgttttggacaagaggcgtggccgggaccctgagatggggggaaagccgagaaggaagaaccctcaggaaggcctgtacaatgaactgcagaaagataagatggcggaggcctacagtgagattgggatgaaaggcgagcgccggaggggcaaggggcacgatggcctttaccagggtctcagtacagccaccaaggacacctacgacgcccttcacatgcaggccctgccccctcgctaa

SEQ ID NO: 63 - DNA, 3533 bp, Artificial Sequence
  Synthesized
atggccttaccagtgaccgccttgctcctgccgctggccttgctgctccacgccgccaggccggatatccagatgacccagagcccgagcagcctgagcgcgagcgtgggtgatcgcgtgaccattacctgcagggcaagtcaggacattagtaaatatttaaattggtatcagcagaaaccgggtaaagcgccgaaactgttaatttatcatacatcaagattacactcaggcgtgccgtcgcgttttagcggctcgggttcgggcaccgattttaccctgaccatctcgagcttgcagccggaggacttcgccacctactattgccaacagggtaatacgcttccgtacacgttcggtcagggcaccaaagtggagatcaaaggtggcggtggctcgggcggtggtgggtcgggtggcggcggatctgaggtgcagctggtggagtctgggggaggcttggtacagcctggggggtccctgagactctcctgtgcagcctctggagtgtccctgcctgattatggcgtgtcctgggtccgccaggctccagggaaggggctggagtgggtttcagtgatctggggcagcgagacaacctactacaacagcgccctgaagtcccgattcaccatctccagagacaatgccaagaactcactgtatctgcaaatgaacagcctgagagccgaggacacggctgtgtattactgtgcgaagcactactactacggcggcagctacgctatggactactggggccaaggaaccctggtcaccgtgtcctcaaccacgacgccagcgccgcgaccaccaacaccggcgcccaccatcgcgtcgcagcccctgtccctgcgcccagaggcgtgccggccagcggcggggggcgcagtgcacacgagggggctggacttcgcctgtgatatctacatctgggcgcccttggccgggacttgtggggtccttctcctgtcactggttatcaccctttactgcaaacggggcagaaagaaactcctgtatatattcaaacaaccatttatgagaccagtacaaactactcaagaggaagatggctgtagctgccgatttccagaagaagaagaaggaggatgtgaactgagagtgaagttcagcaggagcgcagacgcccccgcgtacaagcagggccagaaccagctctataacgagctcaatctaggacgaagagaggagtacgatgttttggacaagaggcgtggccgggaccctgagatggggggaaagccgagaaggaagaaccctcaggaaggcctgtacaatgaactgcagaaagataagatggcggaggcctacagtgagattgggatgaaaggcgagcgccggaggggcaaggggcacgatggcctttaccagggtctcagtacagccaccaaggacacctacgacgcccttcacatgcaggccctgccccctcgctaatctagaggcgcgcccctctccctcccccccccctaacgttactggccgaagccgcttggaataaggccggtgtgcgtttgtctatatgttattttccaccatattgccgtcttttggcaatgtgagggcccggaaacctggccctgtcttcttgacgagcattcctaggggtctttcccctctcgccaaaggaatgcaaggtctgttgaatgtcgtgaaggaagcagttcctctggaagcttcttgaagacaaacaacgtctgtagcgaccctttgcaggcagcggaaccccccacctggcgacaggtgcctctgcggccaaaagccacgtgtataagatacacctgcaaaggcggcacaaccccagtgccacgttgtgagttggatagttgtggaaagagtcaaatggctctcctcaagcgtattcaacaaggggctgaaggatgcccagaaggtaccccattgtatgggatctgatctggggcctcggtacacatgctttacatgtgtttagtcgaggttaaaaaaacgtctaggccccccgaaccacggggacgtggttttcctttgaaaaacacgatgataatatggccacaacccatatgatggccttaccagtgaccgccttgctcctgccgctggccttgctgctccacgccgccaggccggacatcgtgatgacccagtccccctccagcctgacagtgacagccggcgagaaggtgacaatgatctgtaagtccagccagagcctgctgaacagcggcgaccagaagaactacctgacctggtaccagcagaagcctggccagccccccaagctgctgatcttctgggccagcacaagggagagcggcgtgcccgacagattcacaggcagcggcagcggcaccgacttcacactgaccatttcctccgtgcaggccgaggacctcgccgtgtactactgccagaacgactactcctaccccctgacattcggcgccggcaccaaactggagctgaagggtggcggtggctcgggcggtggtgggtcgggtggcggcggatctcaggtgcagctccagcagtccgatgccgagctggtgaagcccggaagcagcgtcaagatcagctgtaaggcctccggctacaccttcacagaccacgccatccactgggtgaagcagaagcccgagcagggcctggagtggatcggccactttagccccggaaacaccgacatcaagtacaacgacaagttcaagggcaaggccaccctgaccgtggacaggagcagcagcaccgcctacatgcagctgaacagcctgacaagcgaggacagcgccgtgtacttctgcaagacctccaccttcttcttcgactactggggccagggaaccaccctgacagtgtccagcaccacgacgccagcgccgcgaccaccaacaccggcgcccaccatcgcgtcgcagcccctgtccctgcgcccagaggcgtgccggccagcggcggggggcgcagtgcacacgagggggctggacttcgcctgtgatatctacatctgggcgcccttggccgggacttgtggggtccttctcctgtcactggttatcaccctttactgcaaacggggcagaaagaaactcctgtatatattcaaacaaccatttatgagaccagtacaaactactcaagaggaagatggctgtagctgccgatttccagaagaagaagaaggaggatgtgaactgagagtgaagttcagcaggagcgcagacgcccccgcgtacaagcagggccagaaccagctctataacgagctcaatctaggacgaagagaggagtacgatgttttggacaagaggcgtggccgggaccctgagatggggggaaagccgagaaggaagaaccctcaggaaggcctgtacaatgaactgcagaaagataagatggcggaggcctacagtgagattgggatgaaaggcgagcgccggaggggcaaggggcacgatggcctttaccagggtctcagtacagccaccaaggacacctacgacgcccttcacatgcaggccctgccccctcgctaa

SEQ ID NO: 64 - DNA, 3545 bp, Artificial Sequence
  Synthesized
atggccttaccagtgaccgccttgctcctgccgctggccttgctgctccacgccgccaggccggatatccagatgacccagagcccaagctccctgtccgcctctgtgggcgacagggtgaccatcacatgccgcgccagccagacaatctggtcctacctgaactggtatcagcagagacccggcaaggcccctaatctgctgatctacgcagcatctagcctgcagtctggagtgccctcccggttctctggaagaggatccggaaccgacttcaccctgacaatctcctctctgcaggccgaggacttcgccacatactattgccagcagagctattccatccctcagacctttggccagggcacaaagctggagatcaagggcggcggcggctctggaggaggaggaagcggaggaggaggatcccaggtgcagctgcagcagagcggaccaggactggtgaagccctcccagaccctgtctctgacatgtgccatcagcggcgattccgtgagctccaacagcgccgcctggaattggatccggcagtctcccagcagaggactggagtggctgggaaggacctactatcgctccaagtggtacaacgattatgccgtgtctgtgaagagccggatcaccatcaaccctgacacatctaagaatcagttcagcctgcagctgaattccgtgaccccagaggacacagccgtgtactattgtgcaagggaggtgaccggcgacctggaggatgcctttgacatctggggccagggcaccatggtgacagtgtctagcaccacgacgccagcgccgcgaccaccaacaccggcgcccaccatcgcgtcgcagcccctgtccctgcgcccagaggcgtgccggccagcggcggggggcgcagtgcacacgagggggctggacttcgcctgtgatatctacatctgggcgcccttggccgggacttgtggggtccttctcctgtcactggttatcaccctttactgcaaacggggcagaaagaaactcctgtatatattcaaacaaccatttatgagaccagtacaaactactcaagaggaagatggctgtagctgccgatttccagaagaagaagaaggaggatgtgaactgagagtgaagttcagcaggagcgcagacgcccccgcgtacaagcagggccagaaccagctctataacgagctcaatctaggacgaagagaggagtacgatgttttggacaagaggcgtggccgggaccctgagatggggggaaagccgagaaggaagaaccctcaggaaggcctgtacaatgaactgcagaaagataagatggcggaggcctacagtgagattgggatgaaaggcgagcgccggaggggcaaggggcacgatggcctttaccagggtctcagtacagccaccaaggacacctacgacgcccttcacatgcaggccctgccccctcgctaatctagaggcgcgcccctctccctcccccccccctaacgttactggccgaagccgcttggaataaggccggtgtgcgtttgtctatatgttattttccaccatattgccgtcttttggcaatgtgagggcccggaaacctggccctgtcttcttgacgagcattcctaggggtctttcccctctcgccaaaggaatgcaaggtctgttgaatgtcgtgaaggaagcagttcctctggaagcttcttgaagacaaacaacgtctgtagcgaccctttgcaggcagcggaaccccccacctggcgacaggtgcctctgcggccaaaagccacgtgtataagatacacctgcaaaggcggcacaaccccagtgccacgttgtgagttggatagttgtggaaagagtcaaatggctctcctcaagcgtattcaacaaggggctgaaggatgcccagaaggtaccccattgtatgggatctgatctggggcctcggtacacatgctttacatgtgtttagtcgaggttaaaaaaacgtctaggccccccgaaccacggggacgtggttttcctttgaaaaacacgatgataatatggccacaacccatatgatggccttaccagtgaccgccttgctcctgccgctggccttgctgctccacgccgccaggccggacatcgtgatgacccagtccccctccagcctgacagtgacagccggcgagaaggtgacaatgatctgtaagtccagccagagcctgctgaacagcggcgaccagaagaactacctgacctggtaccagcagaagcctggccagccccccaagctgctgatcttctgggccagcacaagggagagcggcgtgcccgacagattcacaggcagcggcagcggcaccgacttcacactgaccatttcctccgtgcaggccgaggacctcgccgtgtactactgccagaacgactactcctaccccctgacattcggcgccggcaccaaactggagctgaagggtggcggtggctcgggcggtggtgggtcgggtggcggcggatctcaggtgcagctccagcagtccgatgccgagctggtgaagcccggaagcagcgtcaagatcagctgtaaggcctccggctacaccttcacagaccacgccatccactgggtgaagcagaagcccgagcagggcctggagtggatcggccactttagccccggaaacaccgacatcaagtacaacgacaagttcaagggcaaggccaccctgaccgtggacaggagcagcagcaccgcctacatgcagctgaacagcctgacaagcgaggacagcgccgtgtacttctgcaagacctccaccttcttcttcgactactggggccagggaaccaccctgacagtgtccagcaccacgacgccagcgccgcgaccaccaacaccggcgcccaccatcgcgtcgcagcccctgtccctgcgcccagaggcgtgccggccagcggcggggggcgcagtgcacacgagggggctggacttcgcctgtgatatctacatctgggcgcccttggccgggacttgtggggtccttctcctgtcactggttatcaccctttactgcaaacggggcagaaagaaactcctgtatatattcaaacaaccatttatgagaccagtacaaactactcaagaggaagatggctgtagctgccgatttccagaagaagaagaaggaggatgtgaactgagagtgaagttcagcaggagcgcagacgcccccgcgtacaagcagggccagaaccagctctataacgagctcaatctaggacgaagagaggagtacgatgttttggacaagaggcgtggccgggaccctgagatggggggaaagccgagaaggaagaaccctcaggaaggcctgtacaatgaactgcagaaagataagatggcggaggcctacagtgagattgggatgaaaggcgagcgccggaggggcaaggggcacgatggcctttaccagggtctcagtacagccaccaaggacacctacgacgcccttcacatgcaggccctgccccctcgctaa

SEQ ID NO: 65 - DNA, 3518 bp, Artificial Sequence
  Synthesized
atggccttaccagtgaccgccttgctcctgccgctggccttgctgctccacgccgccaggccggacatccagctcacccagtccccgagctcgctgtccgcctccgtgggagatcgggtcaccatcacgtgccgcgccagccagtcgatttcctcctacctgaactggtaccaacagaagcccggaaaagccccgaagcttctcatctacgccgcctcgagcctgcagtcaggagtgccctcacggttctccggctccggttccggtactgatttcaccctgaccatttcctccctgcaaccggaggacttcgctacttactactgccagcagtcgtactccaccccctacactttcggacaaggcaccaaggtcgaaatcaagggtggcggtggctcgggcggtggtgggtcgggtggcggcggatctgaagtgcaattggtggaatcagggggaggacttgtgcagcctggaggatcgctgagactgtcatgtgccgtgtccggctttgccctgtccaaccacgggatgtcctgggtccgccgcgcgcctggaaagggcctcgaatgggtgtcgggtattgtgtacagcggtagcacctactatgccgcatccgtgaaggggagattcaccatcagccgggacaactccaggaacactctgtacctccaaatgaattcgctgaggccagaggacactgccatctactactgctccgcgcatggcggagagtccgacgtctggggacaggggaccaccgtgaccgtgtctagcaccacgacgccagcgccgcgaccaccaacaccggcgcccaccatcgcgtcgcagcccctgtccctgcgcccagaggcgtgccggccagcggcggggggcgcagtgcacacgagggggctggacttcgcctgtgatatctacatctgggcgcccttggccgggacttgtggggtccttctcctgtcactggttatcaccctttactgcaaacggggcagaaagaaactcctgtatatattcaaacaaccatttatgagaccagtacaaactactcaagaggaagatggctgtagctgccgatttccagaagaagaagaaggaggatgtgaactgagagtgaagttcagcaggagcgcagacgcccccgcgtacaagcagggccagaaccagctctataacgagctcaatctaggacgaagagaggagtacgatgttttggacaagaggcgtggccgggaccctgagatggggggaaagccgagaaggaagaaccctcaggaaggcctgtacaatgaactgcagaaagataagatggcggaggcctacagtgagattgggatgaaaggcgagcgccggaggggcaaggggcacgatggcctttaccagggtctcagtacagccaccaaggacacctacgacgcccttcacatgcaggccctgccccctcgctaatctagaggcgcgcccctctccctcccccccccctaacgttactggccgaagccgcttggaataaggccggtgtgcgtttgtctatatgttattttccaccatattgccgtcttttggcaatgtgagggcccggaaacctggccctgtcttcttgacgagcattcctaggggtctttcccctctcgccaaaggaatgcaaggtctgttgaatgtcgtgaaggaagcagttcctctggaagcttcttgaagacaaacaacgtctgtagcgaccctttgcaggcagcggaaccccccacctggcgacaggtgcctctgcggccaaaagccacgtgtataagatacacctgcaaaggcggcacaaccccagtgccacgttgtgagttggatagttgtggaaagagtcaaatggctctcctcaagcgtattcaacaaggggctgaaggatgcccagaaggtaccccattgtatgggatctgatctggggcctcggtacacatgctttacatgtgtttagtcgaggttaaaaaaacgtctaggccccccgaaccacggggacgtggttttcctttgaaaaacacgatgataatatggccacaacccatatgatggccttaccagtgaccgccttgctcctgccgctggccttgctgctccacgccgccaggccggacatcgtgatgacccagtccccctccagcctgacagtgacagccggcgagaaggtgacaatgatctgtaagtccagccagagcctgctgaacagcggcgaccagaagaactacctgacctggtaccagcagaagcctggccagccccccaagctgctgatcttctgggccagcacaagggagagcggcgtgcccgacagattcacaggcagcggcagcggcaccgacttcacactgaccatttcctccgtgcaggccgaggacctcgccgtgtactactgccagaacgactactcctaccccctgacattcggcgccggcaccaaactggagctgaagggtggcggtggctcgggcggtggtgggtcgggtggcggcggatctcaggtgcagctccagcagtccgatgccgagctggtgaagcccggaagcagcgtcaagatcagctgtaaggcctccggctacaccttcacagaccacgccatccactgggtgaagcagaagcccgagcagggcctggagtggatcggccactttagccccggaaacaccgacatcaagtacaacgacaagttcaagggcaaggccaccctgaccgtggacaggagcagcagcaccgcctacatgcagctgaacagcctgacaagcgaggacagcgccgtgtacttctgcaagacctccaccttcttcttcgactactggggccagggaaccaccctgacagtgtccagcaccacgacgccagcgccgcgaccaccaacaccggcgcccaccatcgcgtcgcagcccctgtccctgcgcccagaggcgtgccggccagcggcggggggcgcagtgcacacgagggggctggacttcgcctgtgatatctacatctgggcgcccttggccgggacttgtggggtccttctcctgtcactggttatcaccctttactgcaaacggggcagaaagaaactcctgtatatattcaaacaaccatttatgagaccagtacaaactactcaagaggaagatggctgtagctgccgatttccagaagaagaagaaggaggatgtgaactgagagtgaagttcagcaggagcgcagacgcccccgcgtacaagcagggccagaaccagctctataacgagctcaatctaggacgaagagaggagtacgatgttttggacaagaggcgtggccgggaccctgagatggggggaaagccgagaaggaagaaccctcaggaaggcctgtacaatgaactgcagaaagataagatggcggaggcctacagtgagattgggatgaaaggcgagcgccggaggggcaaggggcacgatggcctttaccagggtctcagtacagccaccaaggacacctacgacgcccttcacatgcaggccctgccccctcgctaa

SEQ ID NO: 66 - DNA, 2994 bp, Artificial Sequence
  Synthesized
atggccttaccagtgaccgccttgctcctgccgctggccttgctgctccacgccgccaggccggacatccagatgacacagactacatcctccctgtctgcctctctgggagacagagtcaccatcagttgcagggcaagtcaggacattagtaaatatttaaattggtatcagcagaaaccagatggaactgttaaactcctgatctaccatacatcaagattacactcaggagtcccatcaaggttcagtggcagtgggtctggaacagattattctctcaccattagcaacctggagcaagaagatattgccacttacttttgccaacagggtaatacgcttccgtacacgttcggaggggggaccaagctggagatcacaggtggcggtggctcgggcggtggtgggtcgggtggcggcggatctgaggtgaaactgcaggagtcaggacctggcctggtggcgccctcacagagcctgtccgtcacatgcactgtctcaggggtctcattacccgactatggtgtaagctggattcgccagcctccacgaaagggtctggagtggctgggagtaatatggggtagtgaaaccacatactataattcagctctcaaatccagactgaccatcatcaaggacaactccaagagccaagttttcttaaaaatgaacagtctgcaaactgatgacacagccatttactactgtgccaaacattattactacggtggtagctatgctatggactactggggccaaggaacctcagtcaccgtctcctcaaccacgacgccagcgccgcgaccaccaacaccggcgcccaccatcgcgtcgcagcccctgtccctgcgcccagaggcgtgccggccagcggcggggggcgcagtgcacacgagggggctggacttcgcctgtgatatctacatctgggcgcccttggccgggacttgtggggtccttctcctgtcactggttatcaccctttactgcaaacggggcagaaagaaactcctgtatatattcaaacaaccatttatgagaccagtacaaactactcaagaggaagatggctgtagctgccgatttccagaagaagaagaaggaggatgtgaactgagagtgaagttcagcaggagcgcagacgcccccgcgtacaagcagggccagaaccagctctataacgagctcaatctaggacgaagagaggagtacgatgttttggacaagaggcgtggccgggaccctgagatggggggaaagccgagaaggaagaaccctcaggaaggcctgtacaatgaactgcagaaagataagatggcggaggcctacagtgagattgggatgaaaggcgagcgccggaggggcaaggggcacgatggcctttaccagggtctcagtacagccaccaaggacacctacgacgcccttcacatgcaggccctgccccctcgctctagagccacgaacttctctctgttaaagcaagcaggagacgtggaagaaaaccccggtcctcatatgatggccttaccagtgaccgccttgctcctgccgctggccttgctgctccacgccgccaggccggacatcgtgatgacccagtccccctccagcctgacagtgacagccggcgagaaggtgacaatgatctgtaagtccagccagagcctgctgaacagcggcgaccagaagaactacctgacctggtaccagcagaagcctggccagccccccaagctgctgatcttctgggccagcacaagggagagcggcgtgcccgacagattcacaggcagcggcagcggcaccgacttcacactgaccatttcctccgtgcaggccgaggacctcgccgtgtactactgccagaacgactactcctaccccctgacattcggcgccggcaccaaactggagctgaagggtggcggtggctcgggcggtggtgggtcgggtggcggcggatctcaggtgcagctccagcagtccgatgccgagctggtgaagcccggaagcagcgtcaagatcagctgtaaggcctccggctacaccttcacagaccacgccatccactgggtgaagcagaagcccgagcagggcctggagtggatcggccactttagccccggaaacaccgacatcaagtacaacgacaagttcaagggcaaggccaccctgaccgtggacaggagcagcagcaccgcctacatgcagctgaacagcctgacaagcgaggacagcgccgtgtacttctgcaagacctccaccttcttcttcgactactggggccagggaaccaccctgacagtgtccagcaccacgacgccagcgccgcgaccaccaacaccggcgcccaccatcgcgtcgcagcccctgtccctgcgcccagaggcgtgccggccagcggcggggggcgcagtgcacacgagggggctggacttcgcctgtgatatctacatctgggcgcccttggccgggacttgtggggtccttctcctgtcactggttatcaccctttactgcaaacggggcagaaagaaactcctgtatatattcaaacaaccatttatgagaccagtacaaactactcaagaggaagatggctgtagctgccgatttccagaagaagaagaaggaggatgtgaactgagagtgaagttcagcaggagcgcagacgcccccgcgtacaagcagggccagaaccagctctataacgagctcaatctaggacgaagagaggagtacgatgttttggacaagaggcgtggccgggaccctgagatggggggaaagccgagaaggaagaaccctcaggaaggcctgtacaatgaactgcagaaagataagatggcggaggcctacagtgagattgggatgaaaggcgagcgccggaggggcaaggggcacgatggcctttaccagggtctcagtacagccaccaaggacacctacgacgcccttcacatgcaggccctgccccctcgctaa

SEQ ID NO: 67 - DNA, 2994 bp, Artificial Sequence
  Synthesized
atggccttaccagtgaccgccttgctcctgccgctggccttgctgctccacgccgccaggccggatatccagatgacccagagcccgagcagcctgagcgcgagcgtgggtgatcgcgtgaccattacctgcagggcaagtcaggacattagtaaatatttaaattggtatcagcagaaaccgggtaaagcgccgaaactgttaatttatcatacatcaagattacactcaggcgtgccgtcgcgttttagcggctcgggttcgggcaccgattttaccctgaccatctcgagcttgcagccggaggacttcgccacctactattgccaacagggtaatacgcttccgtacacgttcggtcagggcaccaaagtggagatcaaaggtggcggtggctcgggcggtggtgggtcgggtggcggcggatctgaggtgcagctggtggagtctgggggaggcttggtacagcctggggggtccctgagactctcctgtgcagcctctggagtgtccctgcctgattatggcgtgtcctgggtccgccaggctccagggaaggggctggagtgggtttcagtgatctggggcagcgagacaacctactacaacagcgccctgaagtcccgattcaccatctccagagacaatgccaagaactcactgtatctgcaaatgaacagcctgagagccgaggacacggctgtgtattactgtgcgaagcactactactacggcggcagctacgctatggactactggggccaaggaaccctggtcaccgtgtcctcaaccacgacgccagcgccgcgaccaccaacaccggcgcccaccatcgcgtcgcagcccctgtccctgcgcccagaggcgtgccggccagcggcggggggcgcagtgcacacgagggggctggacttcgcctgtgatatctacatctgggcgcccttggccgggacttgtggggtccttctcctgtcactggttatcaccctttactgcaaacggggcagaaagaaactcctgtatatattcaaacaaccatttatgagaccagtacaaactactcaagaggaagatggctgtagctgccgatttccagaagaagaagaaggaggatgtgaactgagagtgaagttcagcaggagcgcagacgcccccgcgtacaagcagggccagaaccagctctataacgagctcaatctaggacgaagagaggagtacgatgttttggacaagaggcgtggccgggaccctgagatggggggaaagccgagaaggaagaaccctcaggaaggcctgtacaatgaactgcagaaagataagatggcggaggcctacagtgagattgggatgaaaggcgagcgccggaggggcaaggggcacgatggcctttaccagggtctcagtacagccaccaaggacacctacgacgcccttcacatgcaggccctgccccctcgctctagagccacgaacttctctctgttaaagcaagcaggagacgtggaagaaaaccccggtcctcatatgatggccttaccagtgaccgccttgctcctgccgctggccttgctgctccacgccgccaggccggacatcgtgatgacccagtccccctccagcctgacagtgacagccggcgagaaggtgacaatgatctgtaagtccagccagagcctgctgaacagcggcgaccagaagaactacctgacctggtaccagcagaagcctggccagccccccaagctgctgatcttctgggccagcacaagggagagcggcgtgcccgacagattcacaggcagcggcagcggcaccgacttcacactgaccatttcctccgtgcaggccgaggacctcgccgtgtactactgccagaacgactactcctaccccctgacattcggcgccggcaccaaactggagctgaagggtggcggtggctcgggcggtggtgggtcgggtggcggcggatctcaggtgcagctccagcagtccgatgccgagctggtgaagcccggaagcagcgtcaagatcagctgtaaggcctccggctacaccttcacagaccacgccatccactgggtgaagcagaagcccgagcagggcctggagtggatcggccactttagccccggaaacaccgacatcaagtacaacgacaagttcaagggcaaggccaccctgaccgtggacaggagcagcagcaccgcctacatgcagctgaacagcctgacaagcgaggacagcgccgtgtacttctgcaagacctccaccttcttcttcgactactggggccagggaaccaccctgacagtgtccagcaccacgacgccagcgccgcgaccaccaacaccggcgcccaccatcgcgtcgcagcccctgtccctgcgcccagaggcgtgccggccagcggcggggggcgcagtgcacacgagggggctggacttcgcctgtgatatctacatctgggcgcccttggccgggacttgtggggtccttctcctgtcactggttatcaccctttactgcaaacggggcagaaagaaactcctgtatatattcaaacaaccatttatgagaccagtacaaactactcaagaggaagatggctgtagctgccgatttccagaagaagaagaaggaggatgtgaactgagagtgaagttcagcaggagcgcagacgcccccgcgtacaagcagggccagaaccagctctataacgagctcaatctaggacgaagagaggagtacgatgttttggacaagaggcgtggccgggaccctgagatggggggaaagccgagaaggaagaaccctcaggaaggcctgtacaatgaactgcagaaagataagatggcggaggcctacagtgagattgggatgaaaggcgagcgccggaggggcaaggggcacgatggcctttaccagggtctcagtacagccaccaaggacacctacgacgcccttcacatgcaggccctgccccctcgctaa

SEQ ID NO: 68 - DNA, 3009 bp, Artificial Sequence
  Synthesized
atggccttaccagtgaccgccttgctcctgccgctggccttgctgctccacgccgccaggccggatatccagatgacccagagcccaagctccctgtccgcctctgtgggcgacagggtgaccatcacatgccgcgccagccagacaatctggtcctacctgaactggtatcagcagagacccggcaaggcccctaatctgctgatctacgcagcatctagcctgcagtctggagtgccctcccggttctctggaagaggatccggaaccgacttcaccctgacaatctcctctctgcaggccgaggacttcgccacatactattgccagcagagctattccatccctcagacctttggccagggcacaaagctggagatcaagggcggcggcggctctggaggaggaggaagcggaggaggaggatcccaggtgcagctgcagcagagcggaccaggactggtgaagccctcccagaccctgtctctgacatgtgccatcagcggcgattccgtgagctccaacagcgccgcctggaattggatccggcagtctcccagcagaggactggagtggctgggaaggacctactatcgctccaagtggtacaacgattatgccgtgtctgtgaagagccggatcaccatcaaccctgacacatctaagaatcagttcagcctgcagctgaattccgtgaccccagaggacacagccgtgtactattgtgcaagggaggtgaccggcgacctggaggatgcctttgacatctggggccagggcaccatggtgacagtgtctagcaccacgacgccagcgccgcgaccaccaacaccggcgcccaccatcgcgtcgcagcccctgtccctgcgcccagaggcgtgccggccagcggcggggggcgcagtgcacacgagggggctggacttcgcctgtgatatctacatctgggcgcccttggccgggacttgtggggtccttctcctgtcactggttatcaccctttactgcaaacggggcagaaagaaactcctgtatatattcaaacaaccatttatgagaccagtacaaactactcaagaggaagatggctgtagctgccgatttccagaagaagaagaaggaggatgtgaactgagagtgaagttcagcaggagcgcagacgcccccgcgtacaagcagggccagaaccagctctataacgagctcaatctaggacgaagagaggagtacgatgttttggacaagaggcgtggccgggaccctgagatggggggaaagccgagaaggaagaaccctcaggaaggcctgtacaatgaactgcagaaagataagatggcggaggcctacagtgagattgggatgaaaggcgagcgccggaggggcaaggggcacgatggcctttaccagggtctcagtacagccaccaaggacacctacgacgcccttcacatgcaggccctgccccctcgctaatctagagccacgaacttctctctgttaaagcaagcaggagacgtggaagaaaaccccggtcctcatatgatggccttaccagtgaccgccttgctcctgccgctggccttgctgctccacgccgccaggccggacatcgtgatgacccagtccccctccagcctgacagtgacagccggcgagaaggtgacaatgatctgtaagtccagccagagcctgctgaacagcggcgaccagaagaactacctgacctggtaccagcagaagcctggccagccccccaagctgctgatcttctgggccagcacaagggagagcggcgtgcccgacagattcacaggcagcggcagcggcaccgacttcacactgaccatttcctccgtgcaggccgaggacctcgccgtgtactactgccagaacgactactcctaccccctgacattcggcgccggcaccaaactggagctgaagggtggcggtggctcgggcggtggtgggtcgggtggcggcggatctcaggtgcagctccagcagtccgatgccgagctggtgaagcccggaagcagcgtcaagatcagctgtaaggcctccggctacaccttcacagaccacgccatccactgggtgaagcagaagcccgagcagggcctggagtggatcggccactttagccccggaaacaccgacatcaagtacaacgacaagttcaagggcaaggccaccctgaccgtggacaggagcagcagcaccgcctacatgcagctgaacagcctgacaagcgaggacagcgccgtgtacttctgcaagacctccaccttcttcttcgactactggggccagggaaccaccctgacagtgtccagcaccacgacgccagcgccgcgaccaccaacaccggcgcccaccatcgcgtcgcagcccctgtccctgcgcccagaggcgtgccggccagcggcggggggcgcagtgcacacgagggggctggacttcgcctgtgatatctacatctgggcgcccttggccgggacttgtggggtccttctcctgtcactggttatcaccctttactgcaaacggggcagaaagaaactcctgtatatattcaaacaaccatttatgagaccagtacaaactactcaagaggaagatggctgtagctgccgatttccagaagaagaagaaggaggatgtgaactgagagtgaagttcagcaggagcgcagacgcccccgcgtacaagcagggccagaaccagctctataacgagctcaatctaggacgaagagaggagtacgatgttttggacaagaggcgtggccgggaccctgagatggggggaaagccgagaaggaagaaccctcaggaaggcctgtacaatgaactgcagaaagataagatggcggaggcctacagtgagattgggatgaaaggcgagcgccggaggggcaaggggcacgatggcctttaccagggtctcagtacagccaccaaggacacctacgacgcccttcacatgcaggccctgccccctcgctaa

SEQ ID NO: 69 - DNA, 2982 bp, Artificial Sequence
  Synthesized
atggccttaccagtgaccgccttgctcctgccgctggccttgctgctccacgccgccaggccggacatccagctcacccagtccccgagctcgctgtccgcctccgtgggagatcgggtcaccatcacgtgccgcgccagccagtcgatttcctcctacctgaactggtaccaacagaagcccggaaaagccccgaagcttctcatctacgccgcctcgagcctgcagtcaggagtgccctcacggttctccggctccggttccggtactgatttcaccctgaccatttcctccctgcaaccggaggacttcgctacttactactgccagcagtcgtactccaccccctacactttcggacaaggcaccaaggtcgaaatcaagggtggcggtggctcgggcggtggtgggtcgggtggcggcggatctgaagtgcaattggtggaatcagggggaggacttgtgcagcctggaggatcgctgagactgtcatgtgccgtgtccggctttgccctgtccaaccacgggatgtcctgggtccgccgcgcgcctggaaagggcctcgaatgggtgtcgggtattgtgtacagcggtagcacctactatgccgcatccgtgaaggggagattcaccatcagccgggacaactccaggaacactctgtacctccaaatgaattcgctgaggccagaggacactgccatctactactgctccgcgcatggcggagagtccgacgtctggggacaggggaccaccgtgaccgtgtctagcaccacgacgccagcgccgcgaccaccaacaccggcgcccaccatcgcgtcgcagcccctgtccctgcgcccagaggcgtgccggccagcggcggggggcgcagtgcacacgagggggctggacttcgcctgtgatatctacatctgggcgcccttggccgggacttgtggggtccttctcctgtcactggttatcaccctttactgcaaacggggcagaaagaaactcctgtatatattcaaacaaccatttatgagaccagtacaaactactcaagaggaagatggctgtagctgccgatttccagaagaagaagaaggaggatgtgaactgagagtgaagttcagcaggagcgcagacgcccccgcgtacaagcagggccagaaccagctctataacgagctcaatctaggacgaagagaggagtacgatgttttggacaagaggcgtggccgggaccctgagatggggggaaagccgagaaggaagaaccctcaggaaggcctgtacaatgaactgcagaaagataagatggcggaggcctacagtgagattgggatgaaaggcgagcgccggaggggcaaggggcacgatggcctttaccagggtctcagtacagccaccaaggacacctacgacgcccttcacatgcaggccctgccccctcgctaatctagagccacgaacttctctctgttaaagcaagcaggagacgtggaagaaaaccccggtcctcatatgatggccttaccagtgaccgccttgctcctgccgctggccttgctgctccacgccgccaggccggacatcgtgatgacccagtccccctccagcctgacagtgacagccggcgagaaggtgacaatgatctgtaagtccagccagagcctgctgaacagcggcgaccagaagaactacctgacctggtaccagcagaagcctggccagccccccaagctgctgatcttctgggccagcacaagggagagcggcgtgcccgacagattcacaggcagcggcagcggcaccgacttcacactgaccatttcctccgtgcaggccgaggacctcgccgtgtactactgccagaacgactactcctaccccctgacattcggcgccggcaccaaactggagctgaagggtggcggtggctcgggcggtggtgggtcgggtggcggcggatctcaggtgcagctccagcagtccgatgccgagctggtgaagcccggaagcagcgtcaagatcagctgtaaggcctccggctacaccttcacagaccacgccatccactgggtgaagcagaagcccgagcagggcctggagtggatcggccactttagccccggaaacaccgacatcaagtacaacgacaagttcaagggcaaggccaccctgaccgtggacaggagcagcagcaccgcctacatgcagctgaacagcctgacaagcgaggacagcgccgtgtacttctgcaagacctccaccttcttcttcgactactggggccagggaaccaccctgacagtgtccagcaccacgacgccagcgccgcgaccaccaacaccggcgcccaccatcgcgtcgcagcccctgtccctgcgcccagaggcgtgccggccagcggcggggggcgcagtgcacacgagggggctggacttcgcctgtgatatctacatctgggcgcccttggccgggacttgtggggtccttctcctgtcactggttatcaccctttactgcaaacggggcagaaagaaactcctgtatatattcaaacaaccatttatgagaccagtacaaactactcaagaggaagatggctgtagctgccgatttccagaagaagaagaaggaggatgtgaactgagagtgaagttcagcaggagcgcagacgcccccgcgtacaagcagggccagaaccagctctataacgagctcaatctaggacgaagagaggagtacgatgttttggacaagaggcgtggccgggaccctgagatggggggaaagccgagaaggaagaaccctcaggaaggcctgtacaatgaactgcagaaagataagatggcggaggcctacagtgagattgggatgaaaggcgagcgccggaggggcaaggggcacgatggcctttaccagggtctcagtacagccaccaaggacacctacgacgcccttcacatgcaggccctgccccctcgctaa

SEQ ID NO: 70 - protein, 244 aa, Artificial Sequence
  Synthesized
DIVMTQSPSSLTVTAGEKVTMICKSSQSLLNSGDQKNYLTWYQQKPGQPPKLLIFWASTRESGVPDRFTGSGSGTDFTLTISSVQAEDLAVYYCQNDYSYPLTFGAGTKLELKGGGGSGGGGSGGGGSQVQLQQSDAELVKPGSSVKISCKASGYTFTDHAIHWVKQKPEQGLEWIGHFSPGNTDIKYNDKFKGKATLTVDRSSSTAYMQLNSLTSEDSAVYFCKTSTFFFDYWGQGTTLTVSS

SEQ ID NO: 71 - protein, 116 aa, Artificial Sequence
  Synthesized
QVQLQQSDAELVKPGSSVKISCKASGYTFTDHAIHWVKQKPEQGLEWIGHFSPGNTDIKYNDKFKGKATLTVDRSSSTAYMQLNSLTSEDSAVYFCKTSTFFFDYWGQGTTLTVSS

SEQ ID NO: 72 - protein, 113 aa, Artificial Sequence
  Synthesized
DIVMTQSPSSLTVTAGEKVTMICKSSQSLLNSGDQKNYLTWYQQKPGQPPKLLIFWASTRESGVPDRFTGSGSGTDFTLTISSVQAEDLAVYYCQNDYSYPLTFGAGTKLELK

SEQ ID NO: 73 - protein, 12 aa, Artificial Sequence
  Synthesized
QSLLNSGDQKNY

SEQ ID NO: 74 - protein, 107 aa, Artificial Sequence
  Synthesized
DIQMTQSPSSLSASVGDRVTITCRASQDISKYLNWYQQKPGKAPKLLIYHTSRLHSGVPSRFSGSGSGTDFTLTISSLQPEDFATYYCQQGNTLPYTFGQGTKVEIK

SEQ ID NO: 75 - protein, 9 aa, Artificial Sequence
  Synthesized
QNDYSYPLT

SEQ ID NO: 76 - protein, 8 aa, Artificial Sequence
  Synthesized
GYTFTDHA

SEQ ID NO: 77 - protein, 8 aa, Artificial Sequence
  Synthesized
FSPGNTDI

SEQ ID NO: 78 - protein, 9 aa, Artificial Sequence
  Synthesized
KTSTFFFDY

SEQ ID NO: 79 - protein, 246 aa, Artificial Sequence
  Synthesized
DIVMTQAAFSNPVTLGTSASISCRSSKSLLHSNGITYFFWYLQKPGLSPQLLIYQMSNLASGVPDRFSSSGSGTDFTLRISRVEAEDVGVYYCAQNLELPPTFGGGTKLEIKRAGGGGSGGGGSGGGGSEVKLVESGGGLVQPGGSMKLSCVASGFTFSNYWMNWVRQSPEKGLEWVAEIRLKSNNYTTHYAESVKGRFTISRDDSKSSVSLQMNNLRVEDTGIYYCTRHYYFDYWGQGTTLTVSS

SEQ ID NO: 80 - protein, 117 aa, Artificial Sequence
  Synthesized
EVKLVESGGGLVQPGGSMKLSCVASGFTFSNYWMNWVRQSPEKGLEWVAEIRLKSNNYTTHYAESVKGRFTISRDDSKSSVSLQMNNLRVEDTGIYYCTRHYYFDYWGQGTTLTVSS

SEQ ID NO: 81 - protein, 114 aa, Artificial Sequence
  Synthesized
DIVMTQAAFSNPVTLGTSASISCRSSKSLLHSNGITYFFWYLQKPGLSPQLLIYQMSNLASGVPDRFSSSGSGTDFTLRISRVEAEDVGVYYCAQNLELPPTFGGGTKLEIKRA

SEQ ID NO: 82 - protein, 16 aa, Artificial Sequence
  Synthesized
RSSKSLLHSNGITYFF

SEQ ID NO: 83 - protein, 7 aa, Artificial Sequence
  Synthesized
QMSNLAS

SEQ ID NO: 84 - protein, 9 aa, Artificial Sequence
  Synthesized
AQNLELPPT

SEQ ID NO: 85 - protein, 5 aa, Artificial Sequence
  Synthesized
NYWMN

SEQ ID NO: 86 - protein, 19 aa, Artificial Sequence
  Synthesized
EIRLKSNNYTTHYAESVKG

SEQ ID NO: 87 - protein, 6 aa, Artificial Sequence
  Synthesized
HYYFDY

SEQ ID NO: 88 - protein, 4 aa, Artificial Sequence
  Synthesized
GSTA

SEQ ID NO: 89 - protein, 97 aa, Artificial Sequence
  Synthesized
CSRAARGTIGARRTGQPLKEDPSAVPVFSVDAGELDFQWREKTPEPPVPCVPEQTEAATIVFPSGMGTSSPARRGSADGPRSAQPLRPEDGHCSWPL

SEQ ID NO: 90 - protein, 17 aa, Artificial Sequence
  Synthesized
CSRAARGTIDGHCSWPL

SEQ ID NO: 91 - protein, 21 aa, Artificial Sequence
  Synthesized
VGVVGGLLGSLVLLVWVLAVI

SEQ ID NO: 92 - protein, 18 aa, Artificial Sequence
  Synthesized
GNILNVSIKICLTLSPST

SEQ ID NO: 93 - protein, 9 aa, Artificial Sequence
  Synthesized
CSRAARGTI

SEQ ID NO: 94 - protein, 80 aa, Artificial Sequence
  Synthesized
GARRTGQPLKEDPSAVPVFSVDYGELDFQWREKTPEPPVPCVPEQTEYATIVFPSGMGTSSPARRGSADGPRSAQPLRPE

SEQ ID NO: 95 - protein, 80 aa, Artificial Sequence; identical to SEQ ID NO: 94
  Synthesized

SEQ ID NO: 96 - protein, 196 aa, Artificial Sequence
  Synthesized
QLVKSELEEKKSELRHKLKYVPHEYIELIEIARNSTQDRILEMKVMEFFMKVYGYRGKHLGGSRKPDGAIYTVGSPIDYGVIVDTKAYSGGYNLPIGQADEMQRYVEENQTRNKHINPNEWWKVYPSSVTEFKFLFVSGHFKGNYKAQLTRLNHITNCNGAVLSVEELLIGGEMIKAGTLTLEEVRRKFNNGEINF

SEQ ID NO: 97 - protein, 196 aa, Artificial Sequence
  Synthesized
QLVKSELEEKKSELRHKLKYVPHEYIELIEIARNSTQDRILEMKVMEFFMKVYGYRGKHLGGSRKPDGAIYTVGSPIDYGVIVDTKAYSGGYNLPIGQADEMQRYVKENQTRNKHINPNEWWKVYPSSVTEFKFLFVSGHFKGNYKAQLTRLNHKTNCNGAVLSVEELLIGGEMIKAGTLTLEEVRRKFNNGEINF

SEQ ID NO: 98 - protein, 196 aa, Artificial Sequence
  Synthesized
QLVKSELEEKKSELRHKLKYVPHEYIELIEIARNSTQDRILEMKVMEFFMKVYGYRGKHLGGSRKPDGAIYTVGSPIDYGVIVDTKAYSGGYNLPIGQADEMERYVEENQTRNKHLNPNEWWKVYPSSVTEFKFLFVSGHFKGNYKAQLTRLNHITNCNGAVLSVEELLIGGEMIKAGTLTLEEVRRKFNNGEINF

SEQ ID NO: 99 - protein, 323 aa, Artificial Sequence [sequence omitted]

SEQ ID NO: 100 - protein, 127 aa, Artificial Sequence
  Synthesized
MNVPTQLLGLLLLWLTGGKCDIQMTQSPASLSASLEEIVTITCKASQAIDAYLSWYQQKPGKSPQLLIYDATSLADGVPSRFSGSRSGTQYSLKISRPQVDDSGIYYCLQSYSTPFTFGSGTKLEIK

SEQ ID NO: 101 - protein, 184 aa, Homo sapiens
MAPLLPIRTLPLILILLALLSPGAADFNISSLSGLLSPALTESLLVALPPCHLTGGNATLMVRRANDSKVVTSSFVVPPCRGRRELVSVVDSGAGFTVTRLSAYQVTNLVPGTKFYISYLVKKGTATESSREIPMSTLPRRNMESIGLGMARTGGMVVITVLLSVAMFLLVLGFIIALALGSRK

SEQ ID NO: 102 - protein, 909 aa, Homo sapiens
MAARPLPVSPARALLLALAGALLAPCEARGVSLWNQGRADEVVSASVGSGDLWIPVKSFDSKNHPEVLNIRLQRESKELIINLERNEGLIASSFTETHYLQDGTDVSLARNYTVILGHCYYHGHVRGYSDSAVSLSTCSGLRGLIVFENESYVLEPMKSATNRYKLFPAKKLKSVRGSCGSHHNTPNLAAKNVFPPPSQTWARRHKRETLKATKYVELVIVADNREFQRQGKDLEKVKQRLIEIANHVDKFYRPLNIRIVLVGVEVWNDMDKCSVSQDPFTSLHEFLDWRKMKLLPRKSHDNAQLVSGVYFQGTTIGMAPIMSMCTADQSGGIVMDHSDNPLGAAVTLAHELGHNFGMNHDTLDRGCSCQMAVEKGGCIMNASTGYPFPMVFSSCSRKDLETSLEKGMGVCLFNLPEVRESFGGQKCGNRFVEEGEECDCGEPEECMNRCCNATTCTLKPDAVCAHGLCCEDCQLKPAGTACRDSSNSCDLPEFCTGASPHCPANVYLHDGHSCQDVDGYCYNGICQTHEQQCVTLWGPGAKPAPGICFERVNSAGDPYGNCGKVSKSSFAKCEMRDAKCGKIQCQGGASRPVIGTNAVSIETNIPLQQGGRILCRGTHVYLGDDMPDPGLVLAGTKCADGKICLNRQCQNISVFGVHECAMQCHGRGVCNNRKNCHCEAHWAPPFCDKFGFGGSTDSGPIRQADNQGLTIGILVTILCLLAAGFVVYLKRKTLIRLLFTNKKTTIEKLRCVRPSRPPRGFQPCQAHLGHLGKGLMRKPPDSYPPKDNPRRLLQCQNVDISRPLNGLNVPQPQSTQRVLPPLHRAPRAPSVPARPLPAKPALRQAQGTCKPNPPQKPLPADPLARTTRLTHALARTPGQWETGLRLAPLRPAPQYPHQVPRSTHTAYIK

SEQ ID NO: 103 - protein, 553 aa, Homo sapiens
MVQRLWVSRLLRHRKAQLLLVNLLTFGLEVCLAAGITYVPPLLLEVGVEEKFMTMVLGIGPVLGLVCVPLLGSASDHWRGRYGRRRPFIWALSLGILLSLFLIPRAGWLAGLLCPDPRPLELALLILGVGLLDFCGQVCFTPLEALLSDLFRDPDHCRQAYSVYAFMISLGGCLGYLLPAIDWDTSALAPYLGTQEECLFGLLTLIFLTCVAATLLVAEEAALGPTEPAEGLSAPSLSPHCCPCRARLAFRNLGALLPRLHQLCCRMPRTLRRLFVAELCSWMALMTFTLFYTDFVGEGLYQGVPRAEPGTEARRHYDEGVRMGSLGLFLQCAISLVFSLVMDRLVQRFGTRAVYLASVAAFPVAAGATCLSHSVAVVTASAALTGFTFSALQILPYTLASLYHREKQVFLPKYRGDTGGASSEDSLMTSFLPGPKPGAPFPNGHVGAGGSGLLPPPPALCGASACDVSVRVVVGEPTEARVVPGRGICLDLAILDSAFLLSQVAPSLFMGSIVQLSQSVTAYMVSAAGLGLVAIYFATQVVFDKSDLAKYSA

SEQ ID NO: 104 - protein, 418 aa, Homo sapiens
MRAAPLLLARAASLSLGFLFLLFFWLDRSVLAKELKFVTLVFRHGDRSPIDTFPTDPIKESSWPQGFGQLTQLGMEQHYELGEYIRKRYRKFLNESYKHEQVYIRSTDVDRTLMSAMTNLAALFPPEGVSIWNPILLWQPIPVHTVPLSEDQLLYLPFRNCPRFQELESETLKSEEFQKRLHPYKDFIATLGKLSGLHGQDLFGIWSKVYDPLYCESVHNFTLPSWATEDTMTKLRELSELSLLSLYGIHKQKEKSRLQGGVLVNEILNHMKRATQIPSYKKLIMYSAHDTTVSGLQMALDVYNGLLPPYASCHLTELYFEKGEYFVEMYYRNETQHEPYPLMLPGCSPSCPLERFAELVGPVIPQDWSTECMTTNSHQVLKVIFAVAFCLISAVLMVLLFIHIRRGLCWQRESYGNI

SEQ ID NO: 105 - protein, 560 aa, Homo sapiens
MKMQKGNVLLMFGLLLHLEAATNSNETSTSANTGSSVISSGASTATNSGSSVTSSGVSTATISGSSVTSNGVSIVTNSEFHTTSSGISTATNSEFSTVSSGISIATNSESSTTSSGASTATNSESSTPSSGASTATNSDSSTTSSGASTATNSDSSTTSSEASTATNSESSTTSSGASTATNSESSTVSSRASTATNSESSTTSSGASTATNSESRTTSNGAGTATNSESSTTSSGASTATNSESSTPSSGAGTATNSESSTTSSGAGTATNSESSTVSSGISTVTNSESSTPSSGANTATNSESSTTSSGANTATNSDSSTTSSGASTATNSESSTTSSGASTATNSESSTTSSGASTATNSGSSTTSSGTSTATNSESSTVSSGASTATTSESSTTSSGASTATNSESSTVSSGASTATNSESSTTSSGANTATNSGSSVTSAGSGTAALTGMHTTSHSASTAVSEAKPGGSLVPWEIFLITLVSVVAAVGLFAGLFFCVRNSLSLRNTFNTAVYHPHGLNHGLGPGPGGNHGAPHRPRWSPNWFWRRPVSSIAMEMS

SEQ ID NO: 106 - protein, 14507 aa, Homo sapiens
MLKPSGLPGSSSPTRSLMTGSRSTKATPEMDSGLTGATLSPKTSTGAIVVTEHTLPFTSPDKTLASPTSSVVGRTTQSLGVMSSALPESTSRGMTHSEQRTSPSLSPQVNGTPSRNYPATSMVSGLSSPRTRTSSTEGNFTKEASTYTLTVETTSGPVTEKYTVPTETSTTEGDSTETPWDTRYIPVKITSPMKTFADSTASKENAPVSMTPAETTVTDSHTPGRTNPSFGTLYSSFLDLSPKGTPNSRGETSLELILSTTGYPFSSPEPGSAGHSRISTSAPLSSSASVLDNKISETSIFSGQSLTSPLSPGVPEARASTMPNSAIPFSMTLSNAETSAERVRSTISSLGTPSISTKQTAETILTFHAFAETMDIPSTHIAKTLASEWLGSPGTLGGTSTSALTTTSPSTTLVSEETNTHHSTSGKETEGTLNTSMTPLETSAPGEESEMTATLVPTLGFTTLDSKIRSPSQVSSSHPTRELRTTGSTSGRQSSSTAAHGSSDILRATTSSTSKASSWTSESTAQQFSEPQHTQWVETSPSMKTERPPASTSVAAPITTSVPSVVSGFTTLKTSSTKGIWLEETSADTLIGESTAGPTTHQFAVPTGISMTGGSSTRGSQGTTHLLTRATASSETSADLTLATNGVPVSVSPAVSKTAAGSSPPGGTKPSYTMVSSVIPETSSLQSSAFREGTSLGLTPLNTRHPFSSPEPDSAGHTKISTSIPLLSSASVLEDKVSATSTFSHHKATSSITTGTPEISTKTKPSSAVLSSMTLSNAATSPERVRNATSPLTHPSPSGEETAGSVLTLSTSAETTDSPNIHPTGTLTSESSESPSTLSLPSVSGVKTTFSSSTPSTHLFTSGEETEETSNPSVSQPETSVSRVRTTLASTSVPTPVFPTMDTWPTRSAQFSSSHLVSELRATSSTSVTNSTGSALPKISHLTGTATMSQTNRDTFNDSAAPQSTTWPETSPRFKTGLPSATTTVSTSATSLSATVMVSKFTSPATSSMEATSIREPSTTILTTETTNGPGSMAVASTNIPIGKGYITEGRLDTSHLPIGTTASSETSMDFTMAKESVSMSVSPSQSMDAAGSSTPGRTSQFVDTFSDDVYHLTSREITIPRDGTSSALTPQMTATHPPSPDPGSARSTWLGILSSSPSSPTPKVTMSSTFSTQRVTTSMIMDTVETSRWNMPNLPSTTSLTPSNIPTSGAIGKSTLVPLDTPSPATSLEASEGGLPTLSTYPESTNTPSIHLGAHASSESPSTIKLTMASVVKPGSYTPLTFPSIETHIHVSTARMAYSSGSSPEMTAPGETNTGSTWDPTTYITTTDPKDTSSAQVSTPHSVRTLRTTENHPKTESATPAAYSGSPKISSSPNLTSPATKAWTITDTTEHSTQLHYTKLAEKSSGFETQSAPGPVSVVIPTSPTIGSSTLELTSDVPGEPLVLAPSEQTTITLPMATWLSTSLTEEMASTDLDISSPSSPMSTFAIFPPMSTPSHELSKSEADTSAIRNTDSTTLDQHLGIRSLGRTGDLTTVPITPLTTTWTSVIEHSTQAQDTLSATMSPTHVTQSLKDQTSIPASASPSHLTEVYPELGTQGRSSSEATTFWKPSTDTLSREIETGPTNIQSTPPMDNTTTGSSSSGVTLGIAHLPIGTSSPAETSTNMALERRSSTATVSMAGTMGLLVTSAPGRSISQSLGRVSSVLSESTTEGVTDSSKGSSPRLNTQGNTALSSSLEPSYAEGSQMSTSIPLTSSPTTPDVEFIGGSTFWTKEVTTVMTSDISKSSARTESSSATLMSTALGSTENTGKEKLRTASMDLPSPTPSMEVTPWISLTLSNAPNTTDSLDLSHGVHTSSAGTLATDRSLNTGVTRASRLENGSDTSSKSLSMGNSTHTSMTYTEKSEVSSSIHPRPETSAPGAETTLTSTPGNRAISLTLPFSSIPVEEVISTGITSGPDINSAPMTHSPITPPTIVWTSTGTIEQSTQPLHAVSSEKVSVQTQSTPYVNSVAVSASPTHENSVSSGSSTSSPYSSASLESLDSTISRRNAITSWLWDLTTSLPTTTWPSTSLSEALSSGHSGVSNPSSTTTEFPLFSAASTSAAKQRNPETETHGPQNTAASTLNTDASSVTGLSETPVGASISSEVPLPMAITSRSDVSGLTSESTANPSLGTASSAGTKLTRTISLPTSESLVSFRMNKDPWTVSIPLGSHPTTNTETSIPVNSAGPPGLSTVASDVIDTPSDGAESIPTVSFSPSPDTEVTTISHFPEKTTHSFRTISSLTHELTSRVTPIPGDWMSSAMSTKPTGASPSITLGERRTITSAAPTTSPIVLTASFTETSTVSLDNETTVKTSDILDARKTNELPSDSSSSSDLINTSIASSTMDVTKTASISPTSISGMTASSSPSLFSSDRPQVPTSTTETNTATSPSVSSNTYSLDGGSNVGGTPSTLPPFTITHPVETSSALLAWSRPVRTFSTMVSTDTASGENPTSSNSVVTSVPAPGTWTSVGSTTDLPAMGFLKTSPAGEAHSLLASTIEPATAFTPHLSAAVVTGSSATSEASLLTTSESKAIHSSPQTPTTPTSGANWETSATPESLLVVTETSDTTLTSKILVTDTILFSTVSTPPSKFPSTGTLSGASFPTLLPDTPAIPLTATEPTSSLATSFDSTPLVTIASDSLGTVPETTLTMSETSNGDALVLKTVSNPDRSIPGITIQGVTESPLHPSSTSPSKIVAPRNTTYEGSITVALSTLPAGTTGSLVFSQSSENSETTALVDSSAGLERASVMPLTTGSQGMASSGGIRSGSTHSTGTKTFSSLPLTMNPGEVTAMSEITTNRLTATQSTAPKGIPVKPTSAESGLLTPVSASSSPSKAFASLTTAPPTWGIPQSTLTFEFSEVPSLDTKSASLPTPGQSLNTIPDSDASTASSSLSKSPEKNPRARMMTSTKAISASSFQSTGFTETPEGSASPSMAGHEPRVPTSGTGDPRYASESMSYPDPSKASSAMTSTSLASKLTTLFSTGQAARSGSSSSPISLSTEKETSFLSPTASTSRKTSLFLGPSMARQPNILVHLQTSALTLSPTSTLNMSQEEPPELTSSQTIAEEEGTTAETQTLTFTPSETPTSLLPVSSPTEPTARRKSSPETWASSISVPAKTSLVETTDGTLVTTIKMSSQAAQGNSTWPAPAEETGSSPAGTSPGSPEMSTTLKIMSSKEPSISPEIRSTVRNSPWKTPETTVPMETTVEPVTLQSTALGSGSTSISHLPTGTTSPTKSPTENMLATERVSLSPSPPEAWTNLYSGTPGGTRQSLATMSSVSLESPTARSITGTGQQSSPELVSKTTGMEFSMWHGSTGGTTGDTHVSLSTSSNILEDPVTSPNSVSSLTDKSKHKTETWVSTTAIPSTVLNNKIMAAEQQTSRSVDEAYSSTSSWSDQTSGSDITLGASPDVTNTLYITSTAQTTSLVSLPSGDQGITSLTNPSGGKTSSASSVTSPSIGLETLRANVSAVKSDIAPTAGHLSQTSSPAEVSILDVTTAPTPGISTTITTMGTNSISTTTPNPEVGMSTMDSTPATERRTTSTEHPSTWSSTAASDSWTVTDMTSNLKVARSPGTISTMHTTSFLASSTELDSMSTPHGRITVIGTSLVTPSSDASAVKTETSTSERTLSPSDTTASTPISTFSRVQRMSISVPDILSTSWTPSSTEAEDVPVSMVSTDHASTKTDPNTPLSTFLFDSLSTLDWDTGRSLSSATATTSAPQGATTPQELTLETMISPATSQLPFSIGHITSAVTPAAMARSSGVTFSRPDPTSKKAEQTSTQLPTTTSAHPGQVPRSAATTLDVIPHTAKTPDATFQRQGQTALTTEARATSDSWNEKEKSTPSAPWITEMMNSVSEDTIKEVTSSSSVLRTLNTLDINLESGTTSSPSWKSSPYERIAPSESTTDKEAIHPSTNTVETTGWVTSSEHASHSTIPAHSASSKLTSPVVTTSTREQAIVSMSTTTWPESTRARTEPNSFLTIELRDVSPYMDTSSTTQTSIISSPGSTAITKGPRTEITSSKRISSSFLAQSMRSSDSPSEAITRLSNFPAMTESGGMILAMQTSPPGATSLSAPTLDTSATASWTGTPLATTQRFTYSEKTTLFSKGPEDTSQPSPPSVEETSSSSSLVPIHATTSPSNILLTSQGHSPSSTPPVTSVFLSETSGLGKTTDMSRISLEPGTSLPPNLSSTAGEALSTYEASRDTKAIHHSADTAVTNMEATSSEYSPIPGHTKPSKATSPLVTSHIMGDITSSTSVFGSSETTEIETVSSVNQGLQERSTSQVASSATETSTVITHVSSGDATTHVTKTQATFSSGTSISSPHQFITSTNTFTDVSTNPSTSLIMTESSGVTITTQTGPTGAATQGPYLLDTSTMPYLTETPLAVTPDFMQSEKTTLISKGPKDVSWTSPPSVAETSYPSSLTPFLVTTIPPATSTLQGQHTSSPVSATSVLTSGLVKTTDMLNTSMEPVTNSPQNLNNPSNEILATLAATTDIETIHPSINKAVTNMGTASSAHVLHSTLPVSSEPSTATSPMVPASSMGDALASISIPGSETTDIEGEPTSSLTAGRKENSTLQEMNSTTESNIILSNVSVGAITEATKMEVPSFDATFIPTPAQSTKFPDIFSVASSRLSNSPPMTISTHMTTTQTGSSGATSKIPLALDTSTLETSAGTPSVVTEGFAHSKITTAMNNDVKDVSQTNPPFQDEASSPSSQAPVLVTTLPSSVAFTPQWHSTSSPVSMSSVLTSSLVKTAGKVDTSLETVTSSPQSMSNTLDDISVTSAATTDIETTHPSINTVVTNVGTTGSAFESHSTVSAYPEPSKVTSPNVTTSTMEDTTISRSIPKSSKTTRTETETTSSLTPKLRETSISQEITSSTETSTVPYKELTGATTEVSRTDVTSSSSTSFPGPDQSTVSLDISTETNTRLSTSPIMTESAEITITTQTGPHGATSQDTFTMDPSNTTPQAGIHSAMTHGFSQLDVTTLMSRIPQDVSWTSPPSVDKTSSPSSFLSSPAMTTPSLISSTLPEDKLSSPMTSLLTSGLVKITDILRTRLEPVTSSLPNFSSTSDKILATSKDSKDTKEIFPSINTEETNVKANNSGHESHSPALADSETPKATTQMVITTTVGDPAPSTSMPVHGSSETTNIKREPTYFLTPRLRETSTSQESSFPTDTSFLLSKVPTGTITEVSSTGVNSSSKISTPDHDKSTVPPDTFTGEIPRVFTSSIKTKSAEMTITTQASPPESASHSTLPLDTSTTLSQGGTHSTVTQGFPYSEVTTLMGMGPGNVSWMTTPPVEETSSVSSLMSSPAMTSPSPVSSTSPQSIPSSPLPVTALPTSVLVTTTDVLGTTSPESVTSSPPNLSSITHERPATYKDTAHTEAAMHHSTNTAVTNVGTSGSGHKSQSSVLADSETSKATPLMSTTSTLGDTSVSTSTPNISQTNQIQTEPTASLSPRLRESSTSEKTSSTTETNTAFSYVPTGAITQASRTEISSSRTSISDLDRPTIAPDISTGMITRLFTSPIMTKSAEMTVTTQTTTPGATSQGILPWDTSTTLFQGGTHSTVSQGFPHSEITTLRSRTPGDVSWMTTPPVEETSSGFSLMSPSMTSPSPVSSTSPESIPSSPLPVTALLTSVLVTTTNVLGTTSPEPVTSSPPNLSSPTQERLTTYKDTAHTEAMHASMHTNTAVANVGTSISGHESQSSVPADSHTSKATSPMGITFAMGDTSVSTSTPAFFETRIQTESTSSLIPGLRDTRTSEEINTVTETSTVLSEVPTTTTTEVSRTEVITSSRTTISGPDHSKMSPYISTETITRLSTFPFVTGSTEMAITNQTGPIGTISQATLTLDTSSTASWEGTHSPVTQRFPHSEETTTMSRSTKGVSWQSPPSVEETSSPSSPVPLPAITSHSSLYSAVSGSSPTSALPVTSLLTSGRRKTIDMLDTHSELVTSSLPSASSFSGEILTSEASTNTETIHFSENTAETNMGTTNSMHKLHSSVSIHSQPSGHTPPKVTGSMMEDAIVSTSTPGSPETKNVDRDSTSPLTPELKEDSTALVMNSTTESNTVFSSVSLDAATEVSRAEVTYYDPTFMPASAQSTKSPDISPEASSSHSNSPPLTISTHKTIATQTGPSGVTSLGQLTLDTSTIATSAGTPSARTQDFVDSETTSVMNNDLNDVLKTSPFSAEEANSLSSQAPLLVTTSPSPVTSTLQEHSTSSLVSVTSVPTPTLAKITDMDTNLEPVTRSPQNLRNTLATSEATTDTHTMHPSINTAVANVGTTSSPNEFYFTVSPDSDPYKATSAVVITSTSGDSIVSTSMPRSSAMKKIESETTFSLIFRLRETSTSQKIGSSSDTSTVFDKAFTAATTEVSRTELTSSSRTSIQGTEKPTMSPDTSTRSVTMLSTFAGLTKSEERTIATQTGPHRATSQGTLTWDTSITTSQAGTHSAMTHGFSQLDLSTLTSRVPEYISGTSPPSVEKTSSSSSLLSLPAITSPSPVPTTLPESRPSSPVHLTSLPTSGLVKTTDMLASVASLPPNLGSTSHKIPTTSEDIKDTEKMYPSTNIAVTNVGTTTSEKESYSSVPAYSEPPKVTSPMVTSFNIRDTIVSTSMPGSSEITRIEMESTFSLAHGLKGTSTSQDPIVSTEKSAVLHKLTTGATETSRTEVASSRRTSIPGPDHSTESPDISTEVIPSLPISLGITESSNMTIITRTGPPLGSTSQGTFTLDTPTTSSRAGTHSMATQEFPHSEMTTVMNKDPEILSWTIPPSIEKTSFSSSLMPSPAMTSPPVSSTLPKTIHTTPSPMTSLLTPSLVMTTDTLGTSPEPTTSSPPNLSSTSHEILTTDEDTTAIEAMHPSTSTAATNVETTSSGHGSQSSVLADSEKTKATAPMDTTSTMGHTTVSTSMSVSSETTKIKRESTYSLTPGLRETSISQNASFSTDTSIVLSEVPTGTTAEVSRTEVTSSGRTSIPGPSQSTVLPEISTRTMTRLFASPTMTESAEMTIPTQTGPSGSTSQDTLTLDTSTTKSQAKTHSTLTQRFPHSEMTTLMSRGPGDMSWQSSPSLENPSSLPSLLSLPATTSPPPISSTLPVTISSSPLPVTSLLTSSPVTTTDMLHTSPELVTSSPPKLSHTSDERLTTGKDTTNTEAVHPSTNTAASNVEIPSSGHESPSSALADSETSKATSPMFITSTQEDTTVAISTPHFLETSRIQKESISSLSPKLRETGSSVETSSAIETSAVLSEVSIGATTEISRTEVTSSSRTSISGSAESTMLPEISTTRKIIKFPTSPILAESSEMTIKTQTSPPGSTSESTFTLDTSTTPSLVITHSTMTQRLPHSEITTLVSRGAGDVPRPSSLPVEETSPPSSQLSLSAMISPSPVSSTLPASSHSSSASVTSLLTPGQVKTTEVLDASAEPETSSPPSLSSTSVEILATSEVTTDTEKIHPFSNTAVTKVGTSSSGHESPSSVLPDSETTKATSAMGTISIMGDTSVSTLTPALSNTRKIQSEPASSLTTRLRETSTSEETSLATEANTVLSKVSTGATTEVSRTEAISFSRTSMSGPEQSTMSQDISIGTIPRISASSVLTESAKMTITTQTGPSESTLESTLNLNTATTPSWVETHSIVIQGFPHPEMTTSMGRGPGGVSWPSPPFVKETSPPSSPLSLPAVTSPHPVSTTFLAHIPPSPLPVTSLLTSGPATTTDILGTSTEPGTSSSSSLSTTSHERLTTYKDTAHTEAVHPSTNTGGTNVATTSSGYKSQSSVLADSSPMCTTSTMGDTSVLTSTPAFLETRRIQTELASSLTPGLRESSGSEGTSSGTKMSTVLSKVPTGATTEISKEDVTSIPGPAQSTISPDISTRTVSWFSTSPVMTESAEITMNTHTSPLGATTQGTSTLDTSSTTSLTMTHSTISQGFSHSQMSTLMRRGPEDVSWMSPPLLEKTRPSFSLMSSPATTSPSPVSSTLPESISSSPLPVTSLLTSGLAKTTDMLHKSSEPVTNSPANLSSTSVEILATSEVTTDTEKTHPSSNRTVTDVGTSSSGHESTSFVLADSQTSKVTSPMVITSTMEDTSVSTSTPGFFETSRIQTEPTSSLTLGLRKTSSSEGTSLATEMSTVLSGVPTGATAEVSRTEVTSSSRTSISGFAQLTVSPETSTETITRLPTSSIMTESAEMMIKTQTDPPGSTPESTHTVDISTTPNWVETHSTVTQRFSHSEMTTLVSRSPGDMLWPSQSSVEETSSASSLLSLPATTSPSPVSSTLVEDFPSASLPVTSLLNPGLVITTDRMGISREPGTSSTSNLSSTSHERLTTLEDTVDTEDMQPSTHTAVTNVRTSISGHESQSSVLSDSETPKATSPMGTTYTMGETSVSISTSDFFETSRIQIEPTSSLTSGLRETSSSERISSATEGSTVLSEVPSGATTEVSRTEVISSRGTSMSGPDQFTISPDISTEAITRLSTSPIMTESAESAITIETGSPGATSEGTLTLDTSTTTFWSGTHSTASPGFSHSEMTTLMSRTPGDVPWPSLPSVEEASSVSSSLSSPAMTSTSFFSTLPESISSSPHPVTALLTLGPVKTTDMLRTSSEPETSSPPNLSSTSAEILATSEVTKDREKIHPSSNTPVVNVGTVIYKHLSPSSVLADLVTTKPTSPMATTSTLGNTSVSTSTPAFPETMMTQPTSSLTSGLREISTSQETSSATERSASLSGMPTGATTKVSRTEALSLGRTSTPGPAQSTISPEISTETITRISTPLTTTGSAEMTITPKTGHSGASSQGTFTLDTSSRASWPGTHSAATHRSPHSGMTTPMSRGPEDVSWPSRPSVEKTSPPSSLVSLSAVTSPSPLYSTPSESSHSSPLRVTSLFTPVMMKTTDMLDTSLEPVTTSPPSMNITSDESLATSKATMETEAIQLSENTAVTQMGTISARQEFYSSYPGLPEPSKVTSPVVTSSTIKDIVSTTIPASSEITRIEMESTSTLTPTPRETSTSQEIHSATKPSTVPYKALTSATIEDSMTQVMSSSRGPSPDQSTMSQDISTEVITRLSTSPIKTESTEMTITTQTGSPGATSRGTLTLDTSTTFMSGTHSTASQGFSHSQMTALMSRTPGDVPWLSHPSVEEASSASFSLSSPVMTSSSPVSSTLPDSIHSSSLPVTSLLTSGLVKTTELLGTSSEPETSSPPNLSSTSAEILAITEVTTDTEKLEMTNVVTSGYTHESPSSVLADSVTTKATSSMGITYPTGDTNVLTSTPAFSDTSRIQTKSKLSLTPGLMETSISEETSSATEKSTVLSSVPTGATTEVSRTEAISSSRTSIPGPAQSTMSSDTSMETITRISTPLTRKESTDMAITPKTGPSGATSQGTFTLDSSSTASWPGTHSATTQRFPQSVVTTPMSRGPEDVSWPSPLSVEKNSPPSSLVSSSSVTSPSPLYSTPSGSSHSSPVPVTSLFTSIMMKATDMLDASLEPETTSAPNMNITSDESLAASKATTETEAIHVFENTAASHVETTSATEELYSSSPGFSEPTKVISPVVTSSSIRDNMVSTTMPGSSGITRIEIESMSSLTPGLRETRTSQDITSSTETSTVLYKMPSGATPEVSRTEVMPSSRTSIPGPAQSTMSLDISDEVVTRLSTSPIMTESAEITITTQTGYSLATSQVTLPLGTSMTFLSGTHSTMSQGLSHSEMTNLMSRGPESLSWTSPRFVETTRSSSSLTSLPLTTSLSPVSSTLLDSSPSSPLPVTSLILPGLVKTTEVLDTSSEPKTSSSPNLSSTSVEIPATSEIMTDTEKIHPSSNTAVAKVRTSSSVHESHSSVLADSETTITIPSMGITSAVDDTTVFTSNPAFSETRRIPTEPTFSLTPGFRETSTSEETTSITETSAVLYGVPTSATTEVSMTEIMSSNRIHIPDSDQSTMSPDIITEVITRLSSSSMMSESTQMTITTQKSSPGATAQSTLTLATTTAPLARTHSTVPPRFLHSEMTTLMSRSPENPSWKSSLFVEKTSSSSSLLSLPVTTSPSVSSTLPQSIPSSSFSVTSLLTPGMVKTTDTSTEPGTSLSPNLSGTSVEILAASEVTTDTEKIHPSSSMAVTNVGTTSSGHELYSSVSIHSEPSKATYPVGTPSSMAETSISTSMPANFETTGFEAEPFSHLTSGFRKTNMSLDTSSVTPTNTPSSPGSTHLLQSSKTDFTSSAKTSSPDWPPASQYTEIPVDIITPFNASPSITESTGITSFPESRFTMSVTESTHHLSTDLLPSAETISTGTVMPSLSEAMTSFATTGVPRAISGSGSPFSRTESGPGDATLSTIAESLPSSTPVPFSSSTFTTTDSSTIPALHEITSSSATPYRVDTSLGTESSTTEGRLVMVSTLDTSSQPGRTSSSPILDTRMTESVELGTVTSAYQVPSLSTRLTRTDGIMEHITKIPNEAAHRGTIRPVKGPQTSTSPASPKGLHTGGTKRMETTTTALKTTTTALKTTSRATLTTSVYTPTLGTLTPLNASMQMASTIPTEMMITTPYVFPDVPETTSSLATSLGAETSTALPRTTPSVFNRESETTASLVSRSGAERSPVIQTLDVSSSEPDTTASWVIHPAETIPTVSKTTPNFFHSELDTVSSTATSHGADVSSAIPTNISPSELDALTPLVTISGTDTSTTFPTLTKSPHETETRTTWLTHPAETSSTIPRTIPNFSHHESDATPSIATSPGAETSSAIPIMTVSPGAEDLVTSQVTSSGTDRNMTIPTLTLSPGEPKTIASLVTHPEAQTSSAIPTSTISPAVSRLVTSMVTSLAAKTSTTNRALTNSPGEPATTVSLVTHPAQTSPTVPWTTSIFFHSKSDTTPSMTTSHGAESSSAVPTPTVSTEVPGVVTPLVTSSRAVISTTIPILTLSPGEPETTPSMATSHGEEASSAIPTPTVSPGVPGVVTSLVTSSRAVTSTTIPILTFSLGEPETTPSMATSHGTEAGSAVPTVLPEVPGMVTSLVASSRAVTSTTLPTLTLSPGEPETTPSMATSHGAEASSTVPTVSPEVPGVVTSLVTSSSGVNSTSIPTLILSPGELETTPSMATSHGAEASSAVPTPTVSPGVSGVVTPLVTSSRAVTSTTIPILTLSSSEPETTPSMATSHGVEASSAVLTVSPEVPGMVTSLVTSSRAVTSTTIPTLTISSDEPETTTSLVTHSEAKMISAIPTLAVSPTVQGLVTSLVTSSGSETSAFSNLTVASSQPETIDSWVAHPGTEASSVVPTLTVSTGEPFTNISLVTHPAESSSTLPRTTSRFSHSELDTMPSTVTSPEAESSSAISTTISPGIPGVLTSLVTSSGRDISATFPTVPESPHESEATASWVTHPAVTSTTVPRTTPNYSHSEPDTTPSIATSPGAEATSDFPTITVSPDVPDMVTSQVTSSGTDTSITIPTLTLSSGEPETTTSFITYSETHTSSAIPTLPVSPGASKMLTSLVISSGTDSTTTFPTLTETPYEPETTAIQLIHPAETNTMVPRTTPKFSHSKSDTTLPVAITSPGPEASSAVSTTTISPDMSDLVTSLVPSSGTDTSTTFPTLSETPYEPETTATWLTHPAETSTTVSGTIPNFSHRGSDTAPSMVTSPGVDTRSGVPTTTIPPSIPGVVTSQVTSSATDTSTAIPTLTPSPGEPETTASSATHPGTQTGFTVPIRTVPSSEPDTMASWVTHPPQTSTPVSRTTSSFSHSSPDATPVMATSPRTEASSAVLTTISPGAPEMVTSQITSSGAATSTTVPTLTHSPGMPETTALLSTHPRTETSKTFPASTVFPQVSETTASLTIRPGAETSTALPTQTTSSLFTLLVTGTSRVDLSPTASPGVSAKTAPLSTHPGTETSTMIPTSTLSLGLLETTGLLATSSSAETSTSTLTLTVSPAVSGLSSASITTDKPQTVTSWNTETSPSVTSVGPPEFSRTVTGTTMTLIPSEMPTPPKTSHGEGVSPTTILRTTMVEATNLATTGSSPTVAKTTTTFNTLAGSLFTPLTTPGMSTLASESVTSRTSYNHRSWISTTSSYNRRYWTPATSTPVTSTFSPGISTSSIPSSTAATVPFMVPFTLNFTITNLQYEEDMRHPGSRKFNATERELQGLLKPLFRNSSLEYLYSGCRLASLRPEKDSSATAVDAICTHRPDPEDLGLDRERLYWELSNLTNGIQELGPYTLDRNSLYVNGFTHRSSMPTTSTPGTSTVDVGTSGTPSSSPSPTTAGPLLMPFTLNFTITNLQYEEDMRRTGSRKFNTMESVLQGLLKPLFKNTSVGPLYSGCRLTLLRPEKDGAATGVDAICTHRLDPKSPGLNREQLYWELSKLTNDIEELGPYTLDRNSLYVNGFTHQSSVSTTSTPGTSTVDLRTSGTPSSLSSPTIMAAGPLLVPFTLNFTITNLQYGEDMGHPGSRKFNTTERVLQGLLGPIFKNTSVGPLYSGCRLTSLRSEKDGAATGVDAICIHHLDPKSPGLNRERLYWELSQLTNGIKELGPYTLDRNSLYVNGFTHRTSVPTSSTPGTSTVDLGTSGTPFSLPSPATAGPLLVLFTLNFTITNLKYEEDMHRPGSRKFNTTERVLQTLLGPMFKNTSVGLLYSGCRLTLLRSEKDGAATGVDAICTHRLDPKSPGVDREQLYWELSQLTNGIKELGPYTLDRNSLYVNGFTHWIPVPTSSTPGTSTVDLGSGTPSSLPSPTTAGPLLVPFTLNFTITNLKYEEDMHCPGSRKFNTTERVLQSLLGPMFKNTSVGPLYSGCRLTLLRSEKDGAATGVDAICTHRLDPKSPGVDREQLYWELSQLTNGIKELGPYTLDRNSLYVNGFTHQTSAPNTSTPGTSTVDLGTSGTPSSLPSPTSAGPLLVPFTLNFTITNLQYEEDMHHPGSRKFNTTERVLQGLLGPMFKNTSVGLLYSGCRLTLLRPEKNGAATGMDAICSHRLDPKSPGLNREQLYWELSQLTHGIKELGPYTLDRNSLYVNGFTHRSSVAPTSTPGTSTVDLGTSGTPSSLPSPTTAVPLLVPFTLNFTITNLQYGEDMRHPGSRKFNTTERVLQGLLGPLFKNSSVGPLYSGCRLISLRSEKDGAATGVDAICTHHLNPQSPGLDREQLYWQLSQMTNGIKELGPYTLDRNSLYVNGFTHRSSGLTTSTPWTSTVDLGTSGTPSPVPSPTTTGPLLVPFTLNFTITNLQYEENMGHPGSRKFNITESVLQGLLKPLFKSTSVGPLYSGCRLTLLRPEKDGVATRVDAICTHRPDPKIPGLDRQQLYWELSQLTHSITELGPYTLDRDSLYVNGFTQRSSVPTTSTPGTFTVQPETSETPSSLPGPTATGPVLLPFTLNFTITNLQYEEDMRRPGSRKFNTTERVLQGLLMPLFKNTSVSSLYSGCRLTLLRPEKDGAATRVDAVCTHRPDPKSPGLDRERLYWKLSQLTHGITELGPYTLDRHSLYVNGFTHQSSMTTTRTPDTSTMHLATSRTPASLSGPMTASPLLVLFTINFTITNLRYEENMHHPGSRKFNTTERVLQGLLRPVFKNTSVGPLYSGCRLTLLRPKKDGAATKVDAICTYRPDPKSPGLDREQLYWELSQLTHSITELGPYTLDRDSLYVNGFTQRSSVPTTSIPGTPTVDLGTSGTPVSKPGPSAASPLLVLFTLNFTITNLRYEENMQHPGSRKFNTTERVLQGLLRSLFKSTSVGPLYSGCRLTLLRPEKDGTATGVDAICTHHPDPKSPRLDREQLYWELSQLTHNITELGPYALDNDSLFVNGFTHRSSVSTTSTPGTPTVYLGASKTPASIFGPSAASHLLILFTLNFTITNLRYEENMWPGSRKFNTTERVLQGLLRPLFKNTSVGPLYSGCRLTLLRPEKDGEATGVDAICTHRPDPTGPGLDREQLYLELSQLTHSITELGPYTLDRDSLYVNGFTHRSSVPTTSTGVVSEEPFTLNFTINNLRYMADMGQPGSLKFNITDNVMQHLLSPLFQRSSLGARYTGCRVIALRSVKNGAETRVDLLCTYLQPLSGPGLPIKQVFHELSQQTHGITRLGPYSLDKDSLYLNGYNEPGPDEPPTTPKPATTFLPPLSEATTAMGYHLKTLTLNFTISNLQYSPDMGKGSATFNSTEGVLQHLLRPLFQKSSMGPFYLGCQLISLRPEKDGAATGVDTTCTYHPDPVGPGLDIQQLYWELSQLTHGVTQLGFYVLDRDSLFINGYAPQNLSIRGEYQINFHIVNWNLSNPDPTSSEYITLLRDIQDKVTTLYKGSQLHDTFRFCLVTNLTMDSVLVTVKALFSSNLDPSLVEQVFLDKTLNASFHWLGSTYQLVDIHVTEMESSVYQPTSSSSTQHFYLNFTITNLPYSQDKAQPGTTNYQRNKRNIEDALNQLFRNSSIKSYFSDCQVSTFRSVPNRHHTGVDSLCNFSPLARRVDRVAIYEEFLRMTRNGTQLQNFTLDRSSVLVDGYSPNRNEPLTGNSDLPFWAVILIGLAGLLGVITCLICGVLVTTRRRKKEGEYNVQQQCPGYYQSHLDLEDLQ

SEQ ID NO: 107 - protein, 267 aa, Homo sapiens
MMSSKPTSHAEVNETIPNPYPPSSFMAPGFQQPLGSINLENQAQGAQRAQPYGITSPGIFASSQPGQGNIQMINPSVGTAVMNFKEEAKALGVIQIMVGLMHIGFGIVLCLISFSFREVLGFASTAVIGGYPFWGGLSFIISGSLSVSASKELSRCLVKGSLGMNIVSSILAFIGVILLLVDMCINGVAGQDYWAVLSGKGISATLMIFSLLEFFVACATAHFANQANTTTNMSVLVIPNMYESNPVTPASSSAPPRCNNYSANAPK

SEQ ID NO: 108 - protein, 535 aa, Homo sapiens
MLGPCMLLLLLLLGLRLQLSLGIIPVEEENPDFWNREAAEALGAAKKLQPAQTAAKNLIIFLGDGMGVSTVTAARILKGQKKDKLGPEIPLAMDRFPYVALSKTYNVDKHVPDSGATATAYLCGVKGNFQTIGLSAAARFNQCNTTRGNEVISVMNRAKKAGKSVGVVTTTRVQHASPAGTYAHTVNRNWYSDADVPASARQEGCQDIATQLISNMDIDVILGGGRKYMFRMGTPDPEYPDDYSQGGTRLDGKNLVQEWLAKRQGARYVWNRTELMQASLDPSVTHLMGLFEPGDMKYEIHRDSTLDPSLMEMTEAALRLLSRNPRGFFLFVEGGRIDHGHHESRAYRALTETIMFDDAIERAGQLTSEEDTLSLVTADHSHVFSFGGYPLRGSSIFGLAPGKARDRKAYTVLLYGNGPGYVLKDGARPDVTESESGSPEYRQQSAVPLDEETHAGEDVAVFARGPQAHLVHGVQEQTFIAHVMAFAACLEPYTACDLAPPAGTTDAAHPGRSVVPALLPLLAGTLLLLETATAP

SEQ ID NO: 109 - protein, 520 aa, Homo sapiens
MEFHNGGHVSGIGGFLVSLTSRMKPHTLAVTPALIFAITVATIGSFQFGYNTGVINAPETIIKEFINKTLTDKANAPPSEVLLTNLWSLSVAIFSVGGMIGSFSVGLFVNRFGRRNSMLIVNLLAATGGCLMGLCKIAESVEMLILGRLVIGLFCGLCTGFVPMYIGEISPTALRGAFGTLNQLGIVIGILVAQIFGLELILGSEELWPVLLGFTILPAILQSAALPCCPESPRFLLINRKKEENATRILQRLWGTQDVSQDIQEMKDESARMSQEKQVTVLELFRVSSYRQPIIISIVLQLSQQLSGINAVFYYSTGIFKDAGVQQPIYATISAGVVNTIFTLLSLFLVERAGRRTLHMIGLGGMAFCSTLMTVSLLLKNHYNGMSFVCIGAILVFVACFEIGPGPIPWFIVAELFSQGPRPAAMAVAGCSNWTSNFLVGLLFPSAAYYLGAYVFIIFTGFLITFLAFTFFKVPETRGRTFEDITRAFEGQAHGADRSGKDGVMGMNSIEPAKETTTNV

SEQ ID NO: 110 - protein, 221 aa, Homo sapiens
MLTLEDKDMKGFSWAIVPALTSLGYLIILVVSIFPFWVRLTNEESHEVFFSGLFENCFNAKCWKPRPLSIYIILGRVFLLSAVFLAFVTTFIMMPFASEFFPRTWKQNFVLACISFFTGACAFLALVLHALEIKALRMKLGPLQFSVLWPYYVLGFGIFLFIVAGTICLIQEMVCPCWHLLSTSQSMEEDHGSLYLDNLESLGGEPSSVQKETQVTAETVI

SEQ ID NO: 111 - protein, 538 aa, Homo sapiens
MGLLLLVLILTPSLAAYRHPDFPLLEKAQQLLQSTGSPYSTNCWLCTSSSTETPGTAYPASPREWTSIEAELHISYRWDPNLKGLMRPANSLLSTVKQDFPDIRQKPPIFGPIFTNINLMGIAPICVMAKRKNGTNVGTLPSTVCNVTFTVDSNQQTYQTYTHNQFRHQPRFPKPPNITFPQGTLLDKSSRFCQGRPSSCSTRNFWFRPADYNQCLQISNLSSTAEWVLLDQTRNSLFWENKTKGANQSQTPCVQVLAGMTIATSYLGISAVSEFFGTSLTPLFHFHISTCLKTQGAFYICGQSIHQCLPSNWTGTCTIGYVTPDIFIAPGNLSLPIPIYGNSPLPRVRRAIHFIPLLAGLGILAGTGTGIAGITKASLTYSQLSKEIANNIDTMAKALTTMQEQIDSLAAVVLQNRRGLDMLTAAQGGICLALDEKCCFWVNQSGKVQDNIRQLLNQASSLRERATQGWLNWEGTWKWFSWVLPLTGPLVSLLLLLLFGPCLLNLITQFVSSRLQAIKLQTNLSAGRHPRNIQESPF

SEQ ID NO: 112 - protein, 1017 aa, Homo sapiens
MVFSVRQCGHVGRTEEVLLTFKIFLVIICLHVVLVTSLEEDTDNSSLSPPPAKLSVVSFAPSSNGTPEVETTSLNDVTLSLLPSNETEKTKITIVKTFNASGVKPQRNICNLSSICNDSAFFRGEIMFQYDKESTVPQNQHITNGTLTGVLSLSELKRSELNKTLQTLSETYFIMCATAEAQSTLNCTFTIKLNNTMNACAVIAALERVKIRPMEHCCCSVRIPCPSSPEELEKLQCDLQDPIVCLADHPRGPPFSSSQSIPVVPRATVLSQVPKATSFAEPPDYSPVTHNVPSPIGEIQPLSPQPSAPIASSPAIDMPPQSETISSPMPQTHVSGTPPPVKASFSSPTVSAPANVNTTSAPPVQTDIVNTSSISDLENQVLQMEKALSLGSLEPNLAGEMINQVSRLLHSPPDMLAPLAQRLLKVVDDIGLQLNFSNTTISLTSPSLALAVIRVNASSFNTTTFVAQDPANLQVSLETQAPENSIGTITLPSSLMNNLPAHDMELASRVQFNFFETPALFQDPSLENLSLISYVISSSVANLTVRNLTRNVTVTLKHINPSQDELTVRCVFWDLGRNGGRGGWSDNGCSVKDRRLNETICTCSHLTSFGVLLDLSRTSVLPAQMMALTFITYIGCGLSSIFLSVTLVTYIAFEKIRRDYPSKILIQLCAALLLLNLVFLLDSWIALYKMQGLCISVAVFLHYFLLVSFTWMGLEAFHMYLALVKVFNTYIRKYILKFCIVGWGVPAVVVTIILTISPDNYGLGSYGKFPNGSPDDFCWINNNAVFYITVVGYFCVIFLLNVSMFIVVLVQLCRIKKKKQLGAQRKTSIQDLRSIAGLTFLLGITWGFAFFAWGPVNVTFMYLFAIFNTLQGFFIFIFYCVAKENVRKQWRRYLCCGKLRLAENSDWSKTATNGLKKQTVNQGVSSSSNSLQSSSNSTNSTTLLVNNDCSVHASGNGNASTERNGVSFSVQNGDVCLHDFTGKQHMFNEKEDSCNGKGRMALRRTSKRGSLHFIEQM

SEQ ID NO: 113 - protein, 775 aa, Homo sapiens
MEPPYSLTAHYDEFQEVKYVSRCGAGGARGASLPPGFPLGAARSATGARSGLPRWNRREVCLLSGLVFAAGLCAILAAMLALKYLGPVAAGGGACPEGCPERKAFARAARFLAANLDASIDPCQDFYSFACGGWLRRHAIPDDKLTYGTIAAIGEQNEERLRRLLARPGGGPGGAAQRKVRAFFRSCLDMREIERLGPRPMLEVIEDCGGWDLGGAEERPGVAARWDLNRLLYKAQGVYSAAALFSLTVSLDDRNSSRYVIRIDQDGLTLPERTLYLAQDEDSEKILAAYRVFMERVLSLLGADAVEQKAQEILQVEQQLANITVSEHDDLRRDVSSMYNKVTLGQLQKITPHLRWKWLLDQIFQEDFSEEEEVVLLATDYMQQVSQLIRSTPHRVLHNYLVWRVVVVLSEHLSPPFREALHELAQEMEGSDKPQELARVCLGQANRHFGMALGALFVHEHFSAASKAKVQQLVEDIKYILGQRLEELDWMDAETRAAARAKLQYMMVMVGYPDFLLKPDAVDKEYEFEVHEKTYFKNILNSIRFSIQLSVKKIRQEVDKSTWLLPPQALNAYYLPNKNQMVFPAGILQPTLYDPDFPQSLNYGGIGTIIGHELTHGYDDWGGQYDRSGNLLHWWTEASYSRFLRKAECIVRLYDNFTVYNQRVNGKHTLGENIADMGGLKLAYHAYQKWVREHGPEHPLPRLKYTHDQLFFIAFAQNWCIKRRSQSIYLQVLTDKHAPEHYRVLGSVSQFEEFGRAFHCPKDSPMNPAHKCSVW

SEQ ID NO: 114 - protein, 529 aa, Homo sapiens
MGPSCPVFLSFTKLSLWWLLLTPAGGEEAKRPPPRAPGDPLSSPSPTALPQGGSHTETEDRLFKHLFRGYNRWARPVPNTSDVVIVRFGLSIAQLIDVDEKNQMMTTNVWLKQEWSDYKLRWNPTDFGNITSLRVPSEMIWIPDIVLYNNADGEFAVTHMTKAHLFSTGTVHWVPPAIYKSSCSIDVTFFPFDQQNCKMKFGSWTYDKAKIDLEQMEQTVDLKDYWESGEWAIVNATGTYNSKKYDCCAEIYPDVTYAFVIRRLPLFYTINLIIPCLLISCLTVLVFYLPSDCGEKITLCISVLLSLTVFLLLITEIIPSTSLVIPLIGEYLLFTMIFVTLSIVITVFVLNVHHRSPSTHTMPHWVRGALLGCVPRWLLMNRPPPPVELCHPLRLKLSPSYHWLESNVDAEEREVVVEEEDRWACAGHVAPSVGTLCSHGHLHSGASGPKAEALLQEGELLLSPHMQKALEGVHYIADHLRSEDADSSVKEDWKYVAMVIDRIFLWLFIIVCFLGTIGLFLPPFLAGMI

SEQ ID NO: 115 - protein, 537 aa, Homo sapiens
MPHLMERMVGSGLLWLALVSCILTQASAVQRGYGNPIEASSYGLDLDCGAPGTPEAHVCFDPCQNYTLLDEPFRSTENSAGSQGCDKNMSGWYRFVGEGGVRMSETCVQVHRCQTDAPMWLNGTHPALGDGITNHTACAHWSGNCCFWKTEVLVKACPGGYHVYRLEGTPWCNLRYCTVPRDPSTVEDKCEKACRPEEECLALNSTWGCFCRQDLNSSDVHSLQPQLDCGPREIKVKVDKCLLGGLGLGEEVIAYLRDPNCSSILQTEERNWVSVTSPVQASACRNILERNQTHAIYKNTLSLVNDFIIRDTILNINFQCAYPLDMKVSLQAALQPIVSSLNVSVDGNGEFIVRMALFQDQNYTNPYEGDAVELSVESVLYVGAILEQGDTSRFNLVLRNCYATPTEDKADLVKYFIIRNSCSNQRDSTIHVEENGQSSESRFSVQMFMFAGHYDLVFLHCEIHLCDSLNEQCQPSCSRSQVRSEVPAIDLARVLDLGPITRRGAQSPGVMNGTPSTAGFLVAWPMVLLTVLLAWLF

SEQ ID NO: 116 - protein, 426 aa, Homo sapiens
MGPLPAPSCTQRITWKGLLLTASLLNFWNPPTTAEVTIEAQPPKVSEGKDVLLLVHNLPQNLPGYFWYKGEMTDLYHYIISYIVDGKIIIYGPAYSGRETVYSNASLLIQNVTRKDAGTYTLHIIKRGDETREEIRHFTFTLYLETPKPYISSSNLNPREAMEAVRLICDPETLDASYLWWMNGQSLPVTHRLQLSKTNRTLYLFGVTKYIAGPYECEIRNPVSASRSDPVTLNLLPKLPIPYITINNLNPRENKDVLAFTCEPKSENYTYIWWLNGQSLPVSPGVKRPIENRILILPSVTRNETGPYQCEIRDRYGGLRSNPVILNVLYGPDLPRIYPSFTYYRSGENLDLSCFTESNPPAEYFWTINGKFQQSGQKLFIPQITRNHSGLYACSVHNSATGKEISKSMTVKVSGPCHGDLTESQS

SEQ ID NO: 117 - protein, 328 aa, Homo sapiens
MEKSIWLLACLAWVLPTGSFVRTKIDTTENLLNTEVHSSPAQRWSMQVPPEVSAEAGDAAVLPCTFTHPHRHYDGPLTAIWRAGEPYAGPQVFRCAAARGSELCQTALSLHGRFRLLGNPRRNDLSLRVERLALADDRRYFCRVEFAGDVHDRYESRHGVRLHVTAAPRIVNISVLPSPAHAFRALCTAEGEPPPALAWSGPALGNSLAAVRSPREGHGHLVTAELPALTHDGRYTCTAANSLGRSEASVYLFRFHGASGASTVALLLGALGFKALLLLGVLAARAARRRPEHLDTPDTPPRSQAQESNYENLSQMNPRSPPATMCSP

SEQ ID NO: 118 - protein, 620 aa, Homo sapiens
MSKSKCSVGLMSSVVAPAKEPNAVGPKEVELILVKEQNGVQLTSSTLTNPRQSPVEAQDRETWGKKIDFLLSVIGFAVDLANVWRFPYLCYKNGGGAFLVPYLLFMVIAGMPLFYMELALGQFNREGAAGVWKICPILKGVGFTVILISLYVGFFYNVIIAWALHYLFSSFTTELPWIHCNNSWNSPNCSDAHPGDSSGDSSGLNDTFGTTPAAEYFERGVLHLHQSHGIDDLGPPRWQLTACLVLVIVLLYFSLWKGVKTSGKVVWITATMPYVVLTALLLRGVTLPGAIDGIRAYLSVDFYRLCEASVWIDAATQVCFSLGVGFGVLIAFSSYNKFTNNCYRDAIVTTSINSLTSFSSGFVVFSFLGYMAQKHSVPIGDVAKDGPGLIFIIYPEAIATLPLSSAWAVVFFIMLLTLGIDSAMGGMESVITGLIDEFQLLHRHRELFTLFIVLATFLLSLFCVTNGGIYVFTLLDHFAAGTSILFGVLIEAIGVAWFYGVGQFSDDIQQMTGQRPSLYWRLCWKLVSPCFLLFVVVVSIVTFRPPHYGAYIFPDWANALGWVIATSSMAMVPIYAAYKFCSLPGSFREKLAYAIAPEKDRELVDRGEVRQFTLRHWLKV

SEQ ID NO: 119 - protein, 398 aa, Homo sapiens
MHTVATSGPNASWGAPANASGCPGCGANASDGPVPSPRAVDAWLVPLFFAALMLLGLVGNSLVIYVICRHKPMRTVTNFYIANLAATDVTFLLCCVPFTALLYPLPGWVLGDFMCKFVNYIQQVSVQATCATLTAMSVDRWYVTVFPLRALHRRTPRLALAVSLSIWVGSAAVSAPVLALHRLSPGPRAYCSEAFPSRALERAFALYNLLALYLLPLLATCACYAAMLRHLGRVAVRPAPADSALQGQVLAERAGAVRAKVSRLVAAVVLLFAACWGPIQLFLVLQALGPAGSWHPRSYAAYALKTWAHCMSYSNSALNPLLYAFLGSHFRQAFRRVCPCAPRRPRRPRRPGPSDPAAPHAELLRLGSHPAPARAQKPGSSGLAARGLCVLGEDNAPL

SEQ ID NO: 120 - protein, 431 aa, Homo sapiens
MQALNITPEQFSRLLRDHNLTREQFIALYRLRPLVYTPELPGRAKLALVLTGVLIFALALFGNALVFYVVTRSKAMRTVTNIFICSLALSDLLITFFCIPVTMLQNISDNWLGGAFICKMVPFVQSTAVVTEILTMTCIAVERHQGLVHPFKMKWQYTNRRAFTMLGVVWLVAVIVGSPMWHVQQLEIKYDFLYEKEHICCLEEWTSPVHQKIYTTFILVILFLLPLMVMLILYSKIGYELWIKKRVGDGSVLRTIHGKEMSKIARKKKRAVIMMVTVVALFAVCWAPFHVVHMMIEYSNFEKEYDDVTIKMIFAIVQIIGFSNSICNPIVYAFMNENFKKNVLSAVCYCIVNKTFSPAQRHGNSGITMMRKKAKFSLRENPVEETKGEAFSDGNIEVKLCEQTEEKKKLKRHLALFRSELAENSPLDSGH

SEQ ID NO: 121 - protein, 335 aa, Homo sapiens
MESSFSFGVILAVLASLIIATNTLVAVAVLLLIHKNDGVSLCFTLNLAVADTLIGVAISGLLTDQLSSPSRPTQKTLCSLRMAFVTSSAAASVLTVMLITFDRYLAIKQPFRYLKIMSGFVAGACIAGLWLVSYLIGFLPLGIPMFQQTAYKGQCSFFAVFHPHFVLTLSCVGFFPAMLLFVFFYCDMLKIASMHSQQIRKMEHAGAMAGGYRSPRTPSDFKALRTVSVLIGSFALSWTPFLITGIVQVACQECHLYLVLERYLWLLGVGNSLLNPLIYAYWQKEVRLQLYHMALGVKKVLTSFLLFLSARNCGPERPRESSCHIVTISSSEFDG

SEQ ID NO: 122 - protein, 220 aa, Homo sapiens
MASAGMQILGVVLTLLGWVNGLVSCALPMWKVTAFIGNSIVVAQVVWEGLWMSCVVQSTGQMQCKVYDSLLALPQDLQAARALCVIALLVALFGLLVYLAGAKCTTCVEEKDSKARLVLTSGIVFVISGVLTLIPVCWTAHAIIRDFYNPLVAEAQKRELGASLYLGWAASGLLLLGGGLLCCTCPSGGSQGPSHYMARYSTSAPAISRGPSEYPTKNYV

SEQ ID NO: 123 - protein, 21 aa, Homo sapiens
MALPVTALLLPLALLLHAARP

SEQ ID NO: 124 - protein, 15 aa, Homo sapiens
GGGGSGGGGSGGGGS

SEQ ID NO: 125 - protein, 45 aa, Artificial Sequence
  Synthesized
TTTPAPRPPTPAPTIASQPLSLRPEACRPAAGGAVHTRGLDFACD

SEQ ID NO: 126 - protein, 23 aa, Artificial Sequence
  Synthesized
YIWAPLAGTCGVLLLSLVITLYC

SEQ ID NO: 127 - protein, 42 aa, Artificial Sequence; identical to SEQ ID NO: 3
  Synthesized

SEQ ID NO: 128 - protein, 112 aa, Artificial Sequence; identical to SEQ ID NO: 4
  Synthesized

SEQ ID NO: 129 - protein, 485 aa, Artificial Sequence
  Synthesized
MALPVTALLLPLALLLHAARPQIVLTQSPAIMSASLGERVTMTCTASSVVISTYLHWYQQKPGSSPKLWIYSTSNLASGVPVRFSGSGSGTSYSLTISSMEAEDAATYYCHQYHRSPWTFGGGTKLEIKGGGGSGGGGSGGGGSEVQLQQSGPELVKPGGSMKISCKASGYSFTGYTMNWVKQSHGKNLEWIGLINPYNGGISYNQKFKDKATLTMDKSSSTAYMELLSLTSEDSAIYFCARDYRYEGFDYWGQGTLVTVSATTTPAPRPPTPAPTIASQPLSLRPEACRPAAGGAVHTRGLDFACDIYIWAPLAGTCGVLLLSLVITLYCKRGRKKLLYIFKQPFMRPVQTTQEEDGCSCRFPEEEEGGCELRVKFSRSADAPAYKQGQNQLYNELNLGRREEYDVLDKRRGRDPEMGGKPRRKNPQEGLYNELQKDKMAEAYSEIGMKGERRRGKGHDGLYQGLSTATKDTYDALHMQALPPR

SEQ ID NO: 130 - protein, 241 aa, Artificial Sequence
  Synthesized
QIVLTQSPAIMSASLGERVTMTCTASSVVISTYLHWYQQKPGSSPKLWIYSTSNLASGVPVRFSGSGSGTSYSLTISSMEAEDAATYYCHQYHRSPWTFGGGTKLEIKGGGGSGGGGSGGGGSEVQLQQSGPELVKPGGSMKISCKASGYSFTGYTMNWVKQSHGKNLEWIGLINPYNGGISYNQKFKDKATLTMDKSSSTAYMELLSLTSEDSAIYFCARDYRYEGFDYWGQGTLVTVSA

SEQ ID NO: 131 - protein, 108 aa, Artificial Sequence
  Synthesized
QIVLTQSPAIMSASLGERVTMTCTASSVVISTYLHWYQQKPGSSPKLWIYSTSNLASGVPVRFSGSGSGTSYSLTISSMEAEDAATYYCHQYHRSPWTFGGGTKLEIK

SEQ ID NO: 132 - protein, 118 aa, Artificial Sequence
  Synthesized
EVQLQQSGPELVKPGGSMKISCKASGYSFTGYTMNWVKQSHGKNLEWIGLINPYNGGISYNQKFKDKATLTMDKSSSTAYMELLSLTSEDSAIYFCARDYRYEGFDYWGQGTLVTVSA

SEQ ID NO: 133 - protein, 488 aa, Artificial Sequence
  Synthesized
MALPVTALLLPLALLLHAARPENVLTQSPAIMSATLGEKVTMSCRATSNVKYMYWYQQKSGASPKLWIYYTSNLASGVPARFSGSGSGTSYSLTISSVEAADAATYYCQQFTSSPSTFGAGTKLELKGGGGSGGGGSGGGGSEVQLQQSGPELVKPGASVKISCKASGYSFTGYFMNWVKQSHGKSLEWIGRINPYNGDTFYNQKFKGKATLTVDKSSNTAHMELRSLTSEDSAVYYCARVLFLDFDDPYLMDYWGQGTSVTVSSTTTPAPRPPTPAPTIASQPLSLRPEACRPAAGGAVHTRGLDFACDIYIWAPLAGTCGVLLLSLVITLYCKRGRKKLLYIFKQPFMRPVQTTQEEDGCSCRFPEEEEGGCELRVKFSRSADAPAYKQGQNQLYNELNLGRREEYDVLDKRRGRDPEMGGKPRRKNPQEGLYNELQKDKMAEAYSEIGMKGERRRGKGHDGLYQGLSTATKDTYDALHMQALPPR

SEQ ID NO: 134 - protein, 244 aa, Artificial Sequence
  Synthesized
ENVLTQSPAIMSATLGEKVTMSCRATSNVKYMYWYQQKSGASPKLWIYYTSNLASGVPARFSGSGSGTSYSLTISSVEAADAATYYCQQFTSSPSTFGAGTKLELKGGGGSGGGGSGGGGSEVQLQQSGPELVKPGASVKISCKASGYSFTGYFMNWVKQSHGKSLEWIGRINPYNGDTFYNQKFKGKATLTVDKSSNTAHMELRSLTSEDSAVYYCARVLFLDFDDPYLMDYWGQGTSVTVSS

SEQ ID NO: 135 - protein, 106 aa, Artificial Sequence
  Synthesized
NVLTQSPAIMSATLGEKVTMSCRATSNVKYMYWYQQKSGASPKLWIYYTSNLASGVPARFSGSGSGTSYSLTISSVEAADAATYYCQQFTSSPSTFGAGTKLELKE

SEQ ID NO: 136 - protein, 123 aa, Artificial Sequence
  Synthesized
EVQLQQSGPELVKPGASVKISCKASGYSFTGYFMNWVKQSHGKSLEWIGRINPYNGDTFYNQKFKGKATLTVDKSSNTAHMELRSLTSEDSAVYYCARVLFLDFDDPYLMDYWGQGTSVTVSS

SEQ ID NO: 137 - protein, 485 aa, Artificial Sequence
  Synthesized
MALPVTALLLPLALLLHAARPDIQMTQSPASLSASVGETVTITCRASENIDSYLAWYQQKQGKSPQLLVYASTLLVDGVPSRFSGSRSGTQFSLKINSLQSEDVARYYCQHYYSIPYTFGSGTKLEIKGGGGSGGGGSGGGGSEVKLVESGGGLVKPGGSLKLSCAASGFTFNSYTMSWVRQTPAKRLEWVVTISSGGGRTYYPDSVKGRFTISRDNARNTLYLQMSSLRSEDTAMYYCIRGDYRYDGFAYWGQGTLVTVSTTTTPAPRPPTPAPTIASQPLSLRPEACRPAAGGAVHTRGLDFACDIYIWAPLAGTCGVLLLSLVITLYCKRGRKKLLYIFKQPFMRPVQTTQEEDGCSCRFPEEEEGGCELRVKFSRSADAPAYKQGQNQLYNELNLGRREEYDVLDKRRGRDPEMGGKPRRKNPQEGLYNELQKDKMAEAYSEIGMKGERRRGKGHDGLYQGLSTATKDTYDALHMQALPPR

SEQ ID NO: 138 - protein, 241 aa, Artificial Sequence
  Synthesized
DIQMTQSPASLSASVGETVTITCRASENIDSYLAWYQQKQGKSPQLLVYASTLLVDGVPSRFSGSRSGTQFSLKINSLQSEDVARYYCQHYYSIPYTFGSGTKLEIKGGGGSGGGGSGGGGSEVKLVESGGGLVKPGGSLKLSCAASGFTFNSYTMSWVRQTPAKRLEWVVTISSGGGRTYYPDSVKGRFTISRDNARNTLYLQMSSLRSEDTAMYYCIRGDYRYDGFAYWGQGTLVTVST

SEQ ID NO: 139 - protein, 107 aa, Artificial Sequence
  Synthesized
DIQMTQSPASLSASVGETVTITCRASENIDSYLAWYQQKQGKSPQLLVYASTLLVDGVPSRFSGSRSGTQFSLKINSLQSEDVARYYCQHYYSIPYTFGSGTKLEIK

SEQ ID NO: 140 - protein, 119 aa, Artificial Sequence
  Synthesized
EVKLVESGGGLVKPGGSLKLSCAASGFTFNSYTMSWVRQTPAKRLEWVVTISSGGGRTYYPDSVKGRFTISRDNARNTLYLQMSSLRSEDTAMYYCIRGDYRYDGFAYWGQGTLVTVST

SEQ ID NO: 141 - protein, 488 aa, Artificial Sequence
  Synthesized
MALPVTALLLPLALLLHAARPENVLTQSPAIMSATLGEKVTMSCRATSNVKYMYWYQQKSGASPKLWIYYTSNLASGVPARFSGSGSGTSYSLTISSVEAADAATYYCQQFTSSPSTFGAGTKLELKGGGGSGGGGSGGGGSEVQLQQSGPELVKPGASVKISCKASGYSFTGYFMNWVKQSHGKSLEWIGRINPYNGDTFYNQKFKGKATLTVDKSSSTAHMELRSLTSEDSAVYYCARVLFLDFDDPYLMDYWGQGTSVTVSSTTTPAPRPPTPAPTIASQPLSLRPEACRPAAGGAVHTRGLDFACDIYIWAPLAGTCGVLLLSLVITLYCKRGRKKLLYIFKQPFMRPVQTTQEEDGCSCRFPEEEEGGCELRVKFSRSADAPAYKQGQNQLYNELNLGRREEYDVLDKRRGRDPEMGGKPRRKNPQEGLYNELQKDKMAEAYSEIGMKGERRRGKGHDGLYQGLSTATKDTYDALHMQALPPR

SEQ ID NO: 142 - protein, 244 aa, Artificial Sequence
  Synthesized
ENVLTQSPAIMSATLGEKVTMSCRATSNVKYMYWYQQKSGASPKLWIYYTSNLASGVPARFSGSGSGTSYSLTISSVEAADAATYYCQQFTSSPSTFGAGTKLELKGGGGSGGGGSGGGGSEVQLQQSGPELVKPGASVKISCKASGYSFTGYFMNWVKQSHGKSLEWIGRINPYNGDTFYNQKFKGKATLTVDKSSSTAHMELRSLTSEDSAVYYCARVLFLDFDDPYLMDYWGQGTSVTVSS

SEQ ID NO: 143 - protein, 106 aa, Artificial Sequence
  Synthesized
ENVLTQSPAIMSATLGEKVTMSCRATSNVKYMYWYQQKSGASPKLWIYYTSNLASGVPARFSGSGSGTSYSLTISSVEAADAATYYCQQFTSSPSTFGAGTKLELK

SEQ ID NO: 144 - protein, 123 aa, Artificial Sequence
  Synthesized
EVQLQQSGPELVKPGASVKISCKASGYSFTGYFMNWVKQSHGKSLEWIGRINPYNGDTFYNQKFKGKATLTVDKSSSTAHMELRSLTSEDSAVYYCARVLFLDFDDPYLMDYWGQGTSVTVSS

SEQ ID NO: 145 - protein, 482 aa, Artificial Sequence
  Synthesized
MALPVTALLLPLALLLHAARPSSELTQDPAVSVALGQTVRITCRGDSLRKYYASWYQQKPRQAPQLVIYHKNNRASGIPDRFSGSISGNTASLTITGAQAEDEAAYFCNSRDTSGNYLVFGGGTKVTVLGGGGGSGGGGSGGGGSQLQLQESGPGLVKPSETLSLTCAVSGASISNWWSWVRQPPGKGLEWIGEVHHSGVTTYKPSLKSRVTISVDNSKNQLSLKLTSVTAADTAVYYCAREFADDAFDIWGRGTMVTVTTTPAPRPPTPAPTIASQPLSLRPEACRPAAGGAVHTRGLDFACDIYIWAPLAGTCGVLLLSLVITLYCKRGRKKLLYIFKQPFMRPVQTTQEEDGCSCRFPEEEEGGCELRVKFSRSADAPAYKQGQNQLYNELNLGRREEYDVLDKRRGRDPEMGGKPRRKNPQEGLYNELQKDKMAEAYSEIGMKGERRRGKGHDGLYQGLSTATKDTYDALHMQALPPR

SEQ ID NO: 146 - protein, 238 aa, Artificial Sequence
  Synthesized
SSELTQDPAVSVALGQTVRITCRGDSLRKYYASWYQQKPRQAPQLVIYHKNNRASGIPDRFSGSISGNTASLTITGAQAEDEAAYFCNSRDTSGNYLVFGGGTKVTVLGGGGGSGGGGSGGGGSQLQLQESGPGLVKPSETLSLTCAVSGASISNWWSWVRQPPGKGLEWIGEVHHSGVTTYKPSLKSRVTISVDNSKNQLSLKLTSVTAADTAVYYCAREFADDAFDIWGRGTMVTV

SEQ ID NO: 147 - protein, 109 aa, Artificial Sequence
  Synthesized
SSELTQDPAVSVALGQTVRITCRGDSLRKYYASWYQQKPRQAPQLVIYHKNNRASGIPDRFSGSISGNTASLTITGAQAEDEAAYFCNSRDTSGNYLVFGGGTKVTVLG

SEQ ID NO: 148 - protein, 114 aa, Artificial Sequence
  Synthesized
QLQLQESGPGLVKPSETLSLTCAVSGASISNWWSWVRQPPGKGLEWIGEVHHSGVTTYKPSLKSRVTISVDNSKNQLSLKLTSVTAADTAVYYCAREFADDAFDIWGRGTMVTV

SEQ ID NO: 149 - protein, 250 aa, Artificial Sequence
  Synthesized
DIVMTQSPLSLPVTPGEPASISCRSTKSLLHSNGNTYLYWYLQKPGQSPQLLIYRMSNLASGVPDRFSGSGSGTDFTLKISRVEAEDVGVYYCMQHLEYPFTFGGGTKVEIKGGGGSGGGGSGGGGSEIQLQQSGAEVKKPGSSVKVSCKASGYTFTDYDMHWVRQAPGQGLEWMGTIDPETGGTAYNQKFKGRVTITADKSTSTAYMELSSLRSEDTAVYYCTSFYYTYSNYDVGFAYWGQGTLVTVSS

SEQ ID NO: 150 - protein, 250 aa, Artificial Sequence
  Synthesized
DIVMTQSPLSLPVTPGEPASISCRSTKSLLHSNGNTYLYWYLQKPGQSPQLLIYRMSNLASGVPDRFSGSGSGTDFTLKISRVEAEDVGVYYCMQHLEYPFTFGGGTKVEIKGGGGSGGGGSGGGGSEIQLQQSGAEVKKPGSSVKVSCKASGYTFTDYDMHWVRQAPGQGLEWIGTIDPETGGTAYNQKFKGRATLTADRSTSTAYMELSSLRSEDTAVYYCTSFYYTYSNYDVGFAYWGQGTLVTVSS

SEQ ID NO: 151 - protein, 250 aa, Artificial Sequence
  Synthesized
DIVMTQSPLSLPVTPGEPASISCRSTKSLLHSNGNTYLYWYLQKPGQSPQLLIYRMSNLASGVPDRFSGSGSGTDFTLKISRVEAEDVGVYYCMQHLEYPFTFGGGTKVEIKGGGGSGGGGSGGGGSEIQLQQSGAEVKKPGSSVKVSCKASGYTFTDYDMHWVKQAPGQGLEWIGTIDPETGGTAYNQKFKGKATLTADRSTSTAYMELSSLRSEDTAVYYCTSFYYTYSNYDVGFAYWGQGTLVTVSS

SEQ ID NO: 152 - protein, 250 aa, Artificial Sequence
  Synthesized
DIVMTQSPLSLPVTPGEPASISCRSTKSLLHSNGNTYLYWYLQKPGQSPQLLIYRMSNLASGVPDRFSGSGSGTDFTLKISRVEAEDVGVYYCMQHLEYPFTFGGGTKVEIKGGGGSGGGGSGGGGSEIQLQQSGAEVKKPGSSVKVSCKASGYTFTDYDMHWVKQAPGHGLEWIGTIDPETGGTAYNQKFKGKATLTADRSTSTAYMELSSLTSEDTAVYYCTSFYYTYSNYDVGFAYWGQGTLVTVSS

SEQ ID NO: 153 - protein, 250 aa, Artificial Sequence
  Synthesized
DIVMTQSPLSLPVTPGEPASISCRSTKSLLHSNGNTYLYWFLQKPGQSPQLLIYRMSNLASGVPDRFSGSGSGTDFTLKISRVEAEDVGVYYCMQHLEYPFTFGGGTKVEIKGGGGSGGGGSGGGGSEIQLQQSGAEVKKPGSSVKVSCKASGYTFTDYDMHWVRQAPGQGLEWMGTIDPETGGTAYNQKFKGRVTITADKSTSTAYMELSSLRSEDTAVYYCTSFYYTYSNYDVGFAYWGQGTLVTVSS

SEQ ID NO: 154 - protein, 250 aa, Artificial Sequence
  Synthesized
DIVMTQSPLSLPVTPGEPASISCRSTKSLLHSNGNTYLYWFLQKPGQSPQLLIYRMSNLASGVPDRFSGSGSGTDFTLKISRVEAEDVGVYYCMQHLEYPFTFGGGTKVEIKGGGGSGGGGSGGGGSEIQLQQSGAEVKKPGSSVKVSCKASGYTFTDYDMHWVRQAPGQGLEWIGTIDPETGGTAYNQKFKGRATLTADRSTSTAYMELSSLRSEDTAVYYCTSFYYTYSNYDVGFAYWGQGTLVTVSS

SEQ ID NO: 155 - protein, 250 aa, Artificial Sequence
  Synthesized
DIVMTQSPLSLPVTPGEPASISCRSTKSLLHSNGNTYLYWFLQKPGQSPQLLIYRMSNLASGVPDRFSGSGSGTDFTLKISRVEAEDVGVYYCMQHLEYPFTFGGGTKVEIKGGGGSGGGGSGGGGSEIQLQQSGAEVKKPGSSVKVSCKASGYTFTDYDMHWVKQAPGQGLEWIGTIDPETGGTAYNQKFKGKATLTADRSTSTAYMELSSLRSEDTAVYYCTSFYYTYSNYDVGFAYWGQGTLVTVSS

SEQ ID NO: 156 - protein, 250 aa, Artificial Sequence
  Synthesized
DIVMTQSPLSLPVTPGEPASISCRSTKSLLHSNGNTYLYWFLQKPGQSPQLLIYRMSNLASGVPDRFSGSGSGTDFTLKISRVEAEDVGVYYCMQHLEYPFTFGGGTKVEIKGGGGSGGGGSGGGGSEIQLQQSGAEVKKPGSSVKVSCKASGYTFTDYDMHWVKQAPGHGLEWIGTIDPETGGTAYNQKFKGKATLTADRSTSTAYMELSSLTSEDTAVYYCTSFYYTYSNYDVGFAYWGQGTLVTVSS

SEQ ID NO: 157 - protein, 112 aa, Artificial Sequence
  Synthesized
DIVMTQSPLSLPVTPGEPASISCRSTKSLLHSNGNTYLYWYLQKPGQSPQLLIYRMSNLASGVPDRFSGSGSGTDFTLKISRVEAEDVGVYYCMQHLEYPFTFGGGTKVEIK

SEQ ID NO: 158 - protein, 112 aa, Artificial Sequence
  Synthesized
DIVMTQSPLSLPVTPGEPASISCRSTKSLLHSNGNTYLYWFLQKPGQSPQLLIYRMSNLASGVPDRFSGSGSGTDFTLKISRVEAEDVGVYYCMQHLEYPFTFGGGTKVEIK

SEQ ID NO: 159 - protein, 123 aa, Artificial Sequence
  Synthesized
EIQLQQSGAEVKKPGSSVKVSCKASGYTFTDYDMHWVRQAPGQGLEWMGTIDPETGGTAYNQKFKGRVTITADKSTSTAYMELSSLRSEDTAVYYCTSFYYTYSNYDVGFAYWGQGTLVTVSS

SEQ ID NO: 160 - protein, 123 aa, Artificial Sequence
  Synthesized
EIQLQQSGAEVKKPGSSVKVSCKASGYTFTDYDMHWVRQAPGQGLEWIGTIDPETGGTAYNQKFKGRATLTADRSTSTAYMELSSLRSEDTAVYYCTSFYYTYSNYDVGFAYWGQGTLVTVSS

SEQ ID NO: 161 - protein, 123 aa, Artificial Sequence
  Synthesized
EIQLQQSGAEVKKPGSSVKVSCKASGYTFTDYDMHWVKQAPGQGLEWIGTIDPETGGTAYNQKFKGKATLTADRSTSTAYMELSSLRSEDTAVYYCTSFYYTYSNYDVGFAYWGQGTLVTVSS

SEQ ID NO: 162 - protein, 123 aa, Artificial Sequence
  Synthesized
EIQLQQSGAEVKKPGSSVKVSCKASGYTFTDYDMHWVKQAPGHGLEWIGTIDPETGGTAYNQKFKGKATLTADRSTSTAYMELSSLTSEDTAVYYCTSFYYTYSNYDVGFAYWGQGTLVTVSS

SEQ ID NO: 163 - protein, 482 aa, Artificial Sequence
  Synthesized
MALPVTALLLPLALLLHAARPDIQMTQSPSSLSASVGDRVTITCKASDLIHNWLAWYQQKPGKAPKLLIYGATSLETGVPSRFSGSGSGTDFTLTISSLQPEDFATYYCQQYWTTPFTFGQGTKVEIKGGGGSGGGGSGGGGSEVQLVESGGGLVQPGGSLRLSCAASGYSITNDYAWNWVRQAPGKGLEWVGYISYSGYTTYNPSLKSRFTISRDTSKNTLYLQMNSLRAEDTAVYYCARWTSGLDYWGQGTLVTVSSTTTPAPRPPTPAPTIASQPLSLRPEACRPAAGGAVHTRGLDFACDIYIWAPLAGTCGVLLLSLVITLYCKRGRKKLLYIFKQPFMRPVQTTQEEDGCSCRFPEEEEGGCELRVKFSRSADAPAYKQGQNQLYNELNLGRREEYDVLDKRRGRDPEMGGKPRRKNPQEGLYNELQKDKMAEAYSEIGMKGERRRGKGHDGLYQGLSTATKDTYDALHMQALPPR

SEQ ID NO: 164 - protein, 238 aa, Artificial Sequence
  Synthesized
DIQMTQSPSSLSASVGDRVTITCKASDLIHNWLAWYQQKPGKAPKLLIYGATSLETGVPSRFSGSGSGTDFTLTISSLQPEDFATYYCQQYWTTPFTFGQGTKVEIKGGGGSGGGGSGGGGSEVQLVESGGGLVQPGGSLRLSCAASGYSITNDYAWNWVRQAPGKGLEWVGYISYSGYTTYNPSLKSRFTISRDTSKNTLYLQMNSLRAEDTAVYYCARWTSGLDYWGQGTLVTVSS

SEQ ID NO: 165 - protein, 107 aa, Artificial Sequence
  Synthesized
DIQMTQSPSSLSASVGDRVTITCKASDLIHNWLAWYQQKPGKAPKLLIYGATSLETGVPSRFSGSGSGTDFTLTISSLQPEDFATYYCQQYWTTPFTFGQGTKVEIK

SEQ ID NO: 166 - protein, 116 aa, Artificial Sequence
  Synthesized
EVQLVESGGGLVQPGGSLRLSCAASGYSITNDYAWNWVRQAPGKGLEWVGYISYSGYTTYNPSLKSRFTISRDTSKNTLYLQMNSLRAEDTAVYYCARWTSGLDYWGQGTLVTVSS

SEQ ID NO: 167 - protein, 482 aa, Artificial Sequence
  Synthesized
MALPVTALLLPLALLLHAARPDIQMTQSSSFLSVSLGGRVTITCKASDLIHNWLAWYQQKPGNAPRLLISGATSLETGVPSRFSGSGSGNDYTLSIASLQTEDAATYYCQQYWTTPFTFGSGTKVEIKGGGGSGGGGSGGGGSDVQLQESGPGLVNPSQSLSLTCTVTGYSITNDYAWNWIRQFPGNKLEWMGYINYSGYTTYNPSLKSRISITRDTSKNQFFLHLNSVTTEDTATYYCARWDGGLTYWGQGTLVTVSATTTPAPRPPTPAPTIASQPLSLRPEACRPAAGGAVHTRGLDFACDIYIWAPLAGTCGVLLLSLVITLYCKRGRKKLLYIFKQPFMRPVQTTQEEDGCSCRFPEEEEGGCELRVKFSRSADAPAYKQGQNQLYNELNLGRREEYDVLDKRRGRDPEMGGKPRRKNPQEGLYNELQKDKMAEAYSEIGMKGERRRGKGHDGLYQGLSTATKDTYDALHMQALPPR

SEQ ID NO: 168 - protein, 238 aa, Artificial Sequence
  Synthesized
DIQMTQSSSFLSVSLGGRVTITCKASDLIHNWLAWYQQKPGNAPRLLISGATSLETGVPSRFSGSGSGNDYTLSIASLQTEDAATYYCQQYWTTPFTFGSGTKVEIKGGGGSGGGGSGGGGSDVQLQESGPGLVNPSQSLSLTCTVTGYSITNDYAWNWIRQFPGNKLEWMGYINYSGYTTYNPSLKSRISITRDTSKNQFFLHLNSVTTEDTATYYCARWDGGLTYWGQGTLVTVSA

SEQ ID NO: 169 - protein, 107 aa, Artificial Sequence
  Synthesized
DIQMTQSSSFLSVSLGGRVTITCKASDLIHNWLAWYQQKPGNAPRLLISGATSLETGVPSRFSGSGSGNDYTLSIASLQTEDAATYYCQQYWTTPFTFGSGTKVEIK

SEQ ID NO: 170 - protein, 116 aa, Artificial Sequence
  Synthesized
DVQLQESGPGLVNPSQSLSLTCTVTGYSITNDYAWNWIRQFPGNKLEWMGYINYSGYTTYNPSLKSRISITRDTSKNQFFLHLNSVTTEDTATYYCARWDGGLTYWGQGTLVTVSA

SEQ ID NO: 171 - protein, 298 aa, Artificial Sequence
  Synthesized
MALPVTALLLPLALLLHAARPGTSLSPPPESSGSPQQPGLSAPHSRQIPAPQGAVLVQREKDLPNYNWNSFGLRFTTTPAPRPPTPAPTIASQPLSLRPEACRPAAGGAVHTRGLDFACDIYIWAPLAGTCGVLLLSLVITLYCKRGRKKLLYIFKQPFMRPVQTTQEEDGCSCRFPEEEEGGCELRVKFSRSADAPAYKQGQNQLYNELNLGRREEYDVLDKRRGRDPEMGGKPRRKNPQEGLYNELQKDKMAEAYSEIGMKGERRRGKGHDGLYQGLSTATKDTYDALHMQALPPR

SEQ ID NO: 172 - protein, 54 aa, Artificial Sequence
  Synthesized
GTSLSPPPESSGSPQQPGLSAPHSRQIPAPQGAVLVQREKDLPNYNWNSFGLRF

SEQ ID NO: 173 - protein, 19 aa, Artificial Sequence
  Synthesized
GTTGCTCCAGGCCACAGCA

SEQ ID NO: 174 - protein, 7 aa, Artificial Sequence
  Synthesized
QSGDLTR

SEQ ID NO: 175 - protein, 7 aa, Artificial Sequence
  Synthesized
QWGTRYR

SEQ ID NO: 176 - protein, 7 aa, Artificial Sequence
  Synthesized
ERGTLAR

SEQ ID NO: 177 - protein, 7 aa, Artificial Sequence
  Synthesized
RSDNLRE

SEQ ID NO: 178 - protein, 7 aa, Artificial Sequence
  Synthesized
QSGDLTR

SEQ ID NO: 179 - protein, 7 aa, Artificial Sequence
  Synthesized
TSGALTR

SEQ ID NO: 180 - protein, 12 aa, Artificial Sequence
  Synthesized
GACTTTGCATGT

SEQ ID NO: 181 - protein, 7 aa, Artificial Sequence
  Synthesized
WRSSLAS

SEQ ID NO: 182 - protein, 7 aa, Artificial Sequence
  Synthesized
QSGSLTR

SEQ ID NO: 183 - protein, 7 aa, Artificial Sequence
  Synthesized
HKWVLRQ

SEQ ID NO: 184 - protein, 7 aa, Artificial Sequence
  Synthesized
DRSNLTR

SEQ ID NO: 185 - protein, 293 aa, Artificial Sequence
  Synthesized
MQRISSLIHLSLFWAGVMSAIELVPEHQTVPVSIGVPATLRCSMKGEAIGNYYINWYRKTQGNTITFIYREKDIYGPGFKDNFQGDIDIAKNLAVLKILAPSERDEGSYYCACDTMGHPRGKLIFGKGTRVTVEPRSQPHTKPSVFVMKNGTNVACLVKEFYPKDIRINLVSSKKITEFDPAIVISPSGKYNAVKLGKYEDSNSVTCSVQHDNKTVHSTDFEVKTDSTDHVKPKETENTKQPSKSCHKPKAIVHTEKVNMMSLTVLGLRMLFAKTVAVNFLLTAKLFFLTRDC

SEQ ID NO: 186 - protein, 315 aa, Artificial Sequence
  Synthesized
MVSLLHASTLAVLGALCVYGAGHLEQPQISSTKTLSKTARLECVVSGITISATSVYWYRERPGEVIQFLVSISYDGTVRKESGIPSGKFEVDRIPETSTSTLTIHNVEKQDIATYYCALWEAQQELGKKIKVFGPGTKLIITDKQLDADVSPKPTIFLPSIAETKLQKAGTYLCLLEKFFPDVIKIHWEEKKSNTILGSQEGNTMKTNDTYMKFSWLTVPEKSLDKEHRCIVRHENNKNGVDQEIIFPPIKTDVITMDPKDNCSKDANDTLLLQLTNTSAYYMYLLLLLKSVVYFAIITCCLLRRTAFCCNGEKS

SEQ ID NO: 187 - protein, 292 aa, Artificial Sequence
  Synthesized
MERISSLIHLSLFWAGVMSAIELVPEHQTVPVSIGVPATLRCSMKGEAIGNYYINWYRKTQGNTMTFIYREKDIYGPGFKDNFQGDIDIAKNLAVLKILAPSERDEGSYYCACDTLGMGGEYTDKLIFGKGTRVTVEPRSQPHTKPSVFVMKNGTNVACLVKEFYPKDIRINLVSSKKITEFDPAIVISPSGKYNAVKLGKYEDSNSVTCSVQHDNKTVHSTDFEVKTDSTDHVKPKETENTKQPSKSCHKPKAIVHTEKVNMMSLTVLGLRMLFAKTVAVNFLLTAKLFFL

SEQ ID NO: 188 - protein, 313 aa, Artificial Sequence
  Synthesized
MVSLLHASTLAVLGALCVYGAGHLEQPQISSTKTLSKTARLECVVSGITISATSVYWYRERPGEVIQFLVSISYDGTVRKESGIPSGKFEVDRIPETSTSTLTIHNVEKQDIATYYCALWEWELGKKIKVFGPGTKLIITDKQLDADVSPKPTIFLPSIAETKLQKAGTYLCLLEKFFPDVIKIHWEEKKSNTILGSQEGNTMKTNDTYMKFSWLTVPEKSLDKEHRCIVRHENNKNGVDQEIIFPPIKTDVITMDPKDNCSKDANDTLLLQLTNTSAYYMYLLLLLKSVVYFAIITCCLLRRTAFCCNGEKS

SEQ ID NO: 189 - protein, 288 aa, Artificial Sequence
  Synthesized
MERISSLIHLSLFWAGVMSAIELVPEHQTVPVSIGVPATLRCSMKGEAIGNYYINWYRKTQGNTMTFIYREKDIYGPGFKDNFQGDIDIAKNLAVLKILAPSERDEGSYYCACDTLVSTDKLIFGKGTRVTVEPRSQPHTKPSVFVMKNGTNVACLVKEFYPKDIRINLVSSKKITEFDPAIVISPSGKYNAVKLGKYEDSNSVTCSVQHDNKTVHSTDFEVKTDSTDHVKPKETENTKQPSKSCHKPKAIVHTEKVNMMSLTVLGLRMLFAKTVAVNFLLTAKLFFL

SEQ ID NO: 190 - protein, 314 aa, Artificial Sequence
  Synthesized
MVSLLHASTLAVLGALCVYGAGHLEQPQISSTKTLSKTARLECVVSGITISATSVYWYRERPGEVIQFLVSISYDGTVRKESGIPSGKFEVDRIPETSTSTLTIHNVEKQDIATYYCALWEVGELGKKIKVFGPGTKLIITDKQLDADVSPKPTIFLPSIAETKLQKAGTYLCLLEKFFPDVIKIHWEEKKSNTILGSQEGNTMKTNDTYMKFSWLTVPEKSLDKEHRCIVRHENNKNGVDQEIIFPPIKTDVITMDPKDNCSKDANDTLLLQLTNTSAYYMYLLLLLKSVVYFAIITCCLLRRTAFCCNGEKS

SEQ ID NO: 191 - protein, 291 aa, Artificial Sequence
  Synthesized
MERISSLIHLSLFWAGVMSAIELVPEHQTVPVSIGVPATLRCSMKGEAIGNYYINWYRKTQGNTMTFIYREKDIYGPGFKDNFQGDIDIAKNLAVLKILAPSERDEGSYYCACDTVAHGGGTDKLIFGKGTRVTVEPRSQPHTKPSVFVMKNGTNVACLVKEFYPKDIRINLVSSKKITEFDPAIVISPSGKYNAVKLGKYEDSNSVTCSVQHDNKTVHSTDFEVKTDSTDHVKPKETENTKQPSKSCHKPKAIVHTEKVNMMSLTVLGLRMLFAKTVAVNFLLTAKLFFL

SEQ ID NO: 192 - protein, 313 aa, Artificial Sequence; identical to SEQ ID NO: 188
  Synthesized

SEQ ID NO: 193 - protein, 291 aa, Artificial Sequence
  Synthesized
MERISSLIHLSLFWAGVMSAIELVPEHQTVPVSIGVPATLRCSMKGEAIGNYYINWYRKTQGNTMTFIYREKDIYGPGFKDNFQGDIDIAKNLAVLKILAPSERDEGSYYCACDNLSTGGYTDKLIFGKGTRVTVEPRSQPHTKPSVFVMKNGTNVACLVKEFYPKDIRINLVSSKKITEFDPAIVISPSGKYNAVKLGKYEDSNSVTCSVQHDNKTVHSTDFEVKTDSTDHVKPKETENTKQPSKSCHKPKAIVHTEKVNMMSLTVLGLRMLFAKTVAVNFLLTAKLFFL

SEQ ID NO: 194 - protein, 316 aa, Artificial Sequence
  Synthesized
MVSLLHASTLAVLGALCVYGAGHLEQPQISSTKTLSKTARLECVVSGITISATSVYWYRERPGEVIQFLVSISYDGTVRKESGIPSGKFEVDRIPETSTSTLTIHNVEKQDIATYYCALWEVYQGELGKKIKVFGPGTKLIITDKQLDADVSPKPTIFLPSIAETKLQKAGTYLCLLEKFFPDVIKIHWEEKKSNTILGSQEGNTMKTNDTYMKFSWLTVPEKSLDKEHRCIVRHENNKNGVDQEIIFPPIKTDVITMDPKDNCSKDANDTLLLQLTNTSAYYMYLLLLLKSVVYFAIITCCLLRRTAFCCNGEKS

SEQ ID NO: 195 - protein, 291 aa, Artificial Sequence
  Synthesized
MERISSLIHLSLFWAGVMSAIELVPEHQTVPVSIGVPATLRCSMKGEAIGNYYINWYRKTQGNTMTFIYREKDIYGPGFKDNFQGDIDIAKNLAVLKILAPSERDEGSYYCACDILGEKPYTDKLIFGKGTRVTVEPRSQPHTKPSVFVMKNGTNVACLVKEFYPKDIRINLVSSKKITEFDPAIVISPSGKYNAVKLGKYEDSNSVTCSVQHDNKTVHSTDFEVKTDSTDHVKPKETENTKQPSKSCHKPKAIVHTEKVNMMSLTVLGLRMLFAKTVAVNFLLTAKLFFL

SEQ ID NO: 196 - DNA, 339 bp, Artificial Sequence; identical to SEQ ID NO: 41
  Synthesized

SEQ ID NO: 197 - protein, 276 aa, Artificial Sequence
  Synthesized
MKKHLTTFLVILWLYFYRGNGKNQVEQSPQSLIILEGKNCTLQCNYTVSPFSNLRWYKQDTGRGPVSLTIMTFSENTKSNGRYTATLDADTKQSSLHITASQLSDSASYICVVSDRGSTLGRLYFGRGTQLTVWPDIQNPDPAVYQLRDSKSSDKSVCLFTDFDSQTNVSQSKDSDVYITDKTVLDMRSMDFKSNSAVAWSNKSDFACANAFNNSIIPEDTFFPSPESSCDVKLVEKSFETDTNLNFQNLSVIGFRILLLKVAGFNLLMTLRLWSS

SEQ ID NO: 198 - protein, 313 aa, Artificial Sequence
  Synthesized
MTIRLLCYVGFYFLGAGLMEADIYQTPRYLVIGTGKKITLECSQTMGHDKMYWYQQDPGMELHLIHYSYGVNSTEKGDLSSESTVSRIRTEHFPLTLESARPSHTSQYLCASSGLRDRGLYEQYFGPGTRLTVTEDLKNVFPPEVAVFEPSEAEISHTQKATLVCLATGFYPDHVELSWWVNGKEVHSGVSTDPQPLKEQPALNDSRYCLSSRLRVSATFWQNPRNHFRCQVQFYGLSENDEWTQDRAKPVTQIVSAEAWGRADCGFTSESYQQGVLSATILYEILLGKATLYAVLVSALVLMAMVKRKDSRG

SEQ ID NO: 199 - protein, 267 aa, Artificial Sequence
  Synthesized
MWGVFLLYVSMKMGGTTGQNIDQPTEMTATEGAIVQINCTYQTSGFNGLFWYQQHAGEAPTFLSYNVLDGLEEKGRFSSFLSRSKGYSYLLLKELQMKDSASYLCAVKDSNYQLIWGAGTKLIIKPNIQNPDPAVYQLRDSKSSDKSVCLFTDFDSQTNVSQSKDSDVYITDKTVLDMRSMDFKSNSAVAWSNKSDFACANAFNNSIIPEDTFFPSPESSCDVKLVEKSFETDTNLNFQNLSVIGFRILLLKVAGFNLLMTLRLWSS

SEQ ID NO: 200 - protein, 138 aa, Artificial Sequence
  Synthesized
MAVLVLLLCLLIFPSCVLSQVQLKESGPGLVQPSQTLSLTCTVSGSSLTSNSVSWIRQPPGKGLEWMGVIWSNGDADYNSAIKSRLSISRDTSKSQVFLKMNSLQTEDTAMYFCASPYYGYYFPFDYWGQGVMVTVSS

SEQ ID NO: 201 - DNA, 3533 bp, Artificial Sequence
  Synthesized
atggccttaccagtgaccgccttgctcctgccgctggccttgctgctccacgccgccaggccggatattgtgatgacccagtccccgtcctccctgaccgtgaccgcgggcgaaaaagtgaccatgatttgcaaatcctcccagtccctgctgaattccggcgatcagaaaaattatctgacctggtatcagcagaaaccgggccagccgccgaaactgctgattttttgggcgtccacccgtgaatccggcgtgccggatcgttttaccggctccggctccggcaccgattttaccctgaccatttcctccgtgcaggcggaagatctggcggtgtattattgccagaatgattattcctatccgctgacctttggcgcgggcaccaaactggaactgaaaggcggcggcggctccggcggcggcggctccggcggcggcggctcccaggtgcagctgcagcagtccgatgcggaactggtgaaaccgggctcctccgtgaaaatttcctgcaaagcgtccggctatacctttaccgatcatgcgattcattgggtgaaacagaaaccggaacagggcctggaatggattggccatttttccccgggcaataccgatattaaatataatgataaatttaaaggcaaagcgaccctgaccgtggatcgttcctcctccaccgcgtatatgcagctgaattccctgacctccgaagattccgcggtgtatttttgcaaaacctccacctttttttttgattattggggccagggcaccaccctgaccgtgtcctccaccacgacgccagcgccgcgaccaccaacaccggcgcccaccatcgcgtcgcagcccctgtccctgcgcccagaggcgtgccggccagcggcggggggcgcagtgcacacgagggggctggacttcgcctgtgatatctacatctgggcgcccttggccgggacttgtggggtccttctcctgtcactggttatcaccctttactgcaaacggggcagaaagaaactcctgtatatattcaaacaaccatttatgagaccagtacaaactactcaagaggaagatggctgtagctgccgatttccagaagaagaagaaggaggatgtgaactgagagtgaagttcagcaggagcgcagacgcccccgcgtacaagcagggccagaaccagctctataacgagctcaatctaggacgaagagaggagtacgatgttttggacaagaggcgtggccgggaccctgagatggggggaaagccgagaaggaagaaccctcaggaaggcctgtacaatgaactgcagaaagataagatggcggaggcctacagtgagattgggatgaaaggcgagcgccggaggggcaaggggcacgatggcctttaccagggtctcagtacagccaccaaggacacctacgacgcccttcacatgcaggccctgccccctcgctaatctagaggcgcgcccctctccctcccccccccctaacgttactggccgaagccgcttggaataaggccggtgtgcgtttgtctatatgttattttccaccatattgccgtcttttggcaatgtgagggcccggaaacctggccctgtcttcttgacgagcattcctaggggtctttcccctctcgccaaaggaatgcaaggtctgttgaatgtcgtgaaggaagcagttcctctggaagcttcttgaagacaaacaacgtctgtagcgaccctttgcaggcagcggaaccccccacctggcgacaggtgcctctgcggccaaaagccacgtgtataagatacacctgcaaaggcggcacaaccccagtgccacgttgtgagttggatagttgtggaaagagtcaaatggctctcctcaagcgtattcaacaaggggctgaaggatgcccagaaggtaccccattgtatgggatctgatctggggcctcggtacacatgctttacatgtgtttagtcgaggttaaaaaaacgtctaggccccccgaaccacggggacgtggttttcctttgaaaaacacgatgataatatggccacaacccatatgatggccttaccagtgaccgccttgctcctgccgctggccttgctgctccacgccgccaggccggacatccagatgacacagactacatcctccctgtctgcctctctgggagacagagtcaccatcagttgcagggcaagtcaggacattagtaaatatttaaattggtatcagcagaaaccagatggaactgttaaactcctgatctaccatacatcaagattacactcaggagtcccatcaaggttcagtggcagtgggtctggaacagattattctctcaccattagcaacctggagcaagaagatattgccacttacttttgccaacagggtaatacgcttccgtacacgttcggaggggggaccaagctggagatcacaggtggcggtggctcgggcggtggtgggtcgggtggcggcggatctgaggtgaaactgcaggagtcaggacctggcctggtggcgccctcacagagcctgtccgtcacatgcactgtctcaggggtctcattacccgactatggtgtaagctggattcgccagcctccacgaaagggtctggagtggctgggagtaatatggggtagtgaaaccacatactataattcagctctcaaatccagactgaccatcatcaaggacaactccaagagccaagttttcttaaaaatgaacagtctgcaaactgatgacacagccatttactactgtgccaaacattattactacggtggtagctatgctatggactactggggccaaggaacctcagtcaccgtctcctcaaccacgacgccagcgccgcgaccaccaacaccggcgcccaccatcgcgtcgcagcccctgtccctgcgcccagaggcgtgccggccagcggcggggggcgcagtgcacacgagggggctggacttcgcctgtgatatctacatctgggcgcccttggccgggacttgtggggtccttctcctgtcactggttatcaccctttactgcaaacggggcagaaagaaactcctgtatatattcaaacaaccatttatgagaccagtacaaactactcaagaggaagatggctgtagctgccgatttccagaagaagaagaaggaggatgtgaactgagagtgaagttcagcaggagcgcagacgcccccgcgtacaagcagggccagaaccagctctataacgagctcaatctaggacgaagagaggagtacgatgttttggacaagaggcgtggccgggaccctgagatggggggaaagccgagaaggaagaaccctcaggaaggcctgtacaatgaactgcagaaagataagatggcggaggcctacagtgagattgggatgaaaggcgagcgccggaggggcaaggggcacgatggcctttaccagggtctcagtacagccaccaaggacacctacgacgcccttcacatgcaggccctgccccctcgctaa

SEQ ID NO: 202 - protein, 488 aa, Artificial Sequence
  Synthesized
MALPVTALLLPLALLLHAARPDIVMTQSPSSLTVTAGEKVTMICKSSQSLLNSGDQKNYLTWYQQKPGQPPKLLIFWASTRESGVPDRFTGSGSGTDFTLTISSVQAEDLAVYYCQNDYSYPLTFGAGTKLELKGGGGSGGGGSGGGGSQVQLQQSDAELVKPGSSVKISCKASGYTFTDHAIHWVKQKPEQGLEWIGHFSPGNTDIKYNDKFKGKATLTVDRSSSTAYMQLNSLTSEDSAVYFCKTSTFFFDYWGQGTTLTVSSTTTPAPRPPTPAPTIASQPLSLRPEACRPAAGGAVHTRGLDFACDIYIWAPLAGTCGVLLLSLVITLYCKRGRKKLLYIFKQPFMRPVQTTQEEDGCSCRFPEEEEGGCELRVKFSRSADAPAYQQGQNQLYNELNLGRREEYDVLDKRRGRDPEMGGKPRRKNPQEGLYNELQKDKMAEAYSEIGMKGERRRGKGHDGLYQGLSTATKDTYDALHMQALPPR

SEQ ID NO: 203 - protein, 486 aa, Artificial Sequence
  Synthesized
MALPVTALLLPLALLLHAARPDIQMTQTTSSLSASLGDRVTISCRASQDISKYLNWYQQKPDGTVKLLIYHTSRLHSGVPSRFSGSGSGTDYSLTISNLEQEDIATYFCQQGNTLPYTFGGGTKLEITGGGGSGGGGSGGGGSEVKLQESGPGLVAPSQSLSVTCTVSGVSLPDYGVSWIRQPPRKGLEWLGVIWGSETTYYNSALKSRLTIIKDNSKSQVFLKMNSLQTDDTAIYYCAKHYYYGGSYAMDYWGQGTSVTVSSTTTPAPRPPTPAPTIASQPLSLRPEACRPAAGGAVHTRGLDFACDIYIWAPLAGTCGVLLLSLVITLYCKRGRKKLLYIFKQPFMRPVQTTQEEDGCSCRFPEEEEGGCELRVKFSRSADAPAYQQGQNQLYNELNLGRREEYDVLDKRRGRDPEMGGKPRRKNPQEGLYNELQKDKMAEAYSEIGMKGERRRGKGHDGLYQGLSTATKDTYDALHMQALPPR

SEQ ID NO: 204 - DNA, 3524 bp, Artificial Sequence
  Synthesized
atggccttaccagtgaccgccttgctcctgccgctggccttgctgctccacgccgccaggccggatattgtgatgacccagtccccgtcctccctgaccgtgaccgcgggcgaaaaagtgaccatgatttgcaaatcctcccagtccctgctgaattccggcgatcagaaaaattatctgacctggtatcagcagaaaccgggccagccgccgaaactgctgattttttgggcgtccacccgtgaatccggcgtgccggatcgttttaccggctccggctccggcaccgattttaccctgaccatttcctccgtgcaggcggaagatctggcggtgtattattgccagaatgattattcctatccgctgacctttggcgcgggcaccaaactggaactgaaaggcggcggcggctccggcggcggcggctccggcggcggcggctcccaggtgcagctgcagcagtccgatgcggaactggtgaaaccgggctcctccgtgaaaatttcctgcaaagcgtccggctatacctttaccgatcatgcgattcattgggtgaaacagaaaccggaacagggcctggaatggattggccatttttccccgggcaataccgatattaaatataatgataaatttaaaggcaaagcgaccctgaccgtggatcgttcctcctccaccgcgtatatgcagctgaattccctgacctccgaagattccgcggtgtatttttgcaaaacctccacctttttttttgattattggggccagggcaccaccctgaccgtgtcctccaccacgacgccagcgccgcgaccaccaacaccggcgcccaccatcgcgtcgcagcccctgtccctgcgcccagaggcgtgccggccagcggcggggggcgcagtgcacacgagggggctggacttcgcctgtgatatctacatctgggcgcccttggccgggacttgtggggtccttctcctgtcactggttatcaccaaacggggcagaaagaaactcctgtatatattcaaacaaccatttatgagaccagtacaaactactcaagaggaagatggctgtagctgccgatttccagaagaagaagaaggaggatgtgaactgagagtgaagttcagcaggagcgcagacgcccccgcgtacaagcagggccagaaccagctctataacgagctcaatctaggacgaagagaggagtacgatgttttggacaagaggcgtggccgggaccctgagatggggggaaagccgagaaggaagaaccctcaggaaggcctgtacaatgaactgcagaaagataagatggcggaggcctacagtgagattgggatgaaaggcgagcgccggaggggcaaggggcacgatggcctttaccagggtctcagtacagccaccaaggacacctacgacgcccttcacatgcaggccctgccccctcgctaatctagaggcgcgcccctctccctcccccccccctaacgttactggccgaagccgcttggaataaggccggtgtgcgtttgtctatatgttattttccaccatattgccgtcttttggcaatgtgagggcccggaaacctggccctgtcttcttgacgagcattcctaggggtctttcccctctcgccaaaggaatgcaaggtctgttgaatgtcgtgaaggaagcagttcctctggaagcttcttgaagacaaacaacgtctgtagcgaccctttgcaggcagcggaaccccccacctggcgacaggtgcctctgcggccaaaagccacgtgtataagatacacctgcaaaggcggcacaaccccagtgccacgttgtgagttggatagttgtggaaagagtcaaatggctctcctcaagcgtattcaacaaggggctgaaggatgcccagaaggtaccccattgtatgggatctgatctggggcctcggtacacatgctttacatgtgtttagtcgaggttaaaaaaacgtctaggccccccgaaccacggggacgtggttttcctttgaaaaacacgatgataatatggccacaacccatatgatggccttaccagtgaccgccttgctcctgccgctggccttgctgctccacgccgccaggccggacatccagatgacacagactacatcctccctgtctgcctctctgggagacagagtcaccatcagttgcagggcaagtcaggacattagtaaatatttaaattggtatcagcagaaaccagatggaactgttaaactcctgatctaccatacatcaagattacactcaggagtcccatcaaggttcagtggcagtgggtctggaacagattattctctcaccattagcaacctggagcaagaagatattgccacttacttttgccaacagggtaatacgcttccgtacacgttcggaggggggaccaagctggagatcacaggtggcggtggctcgggcggtggtgggtcgggtggcggcggatctgaggtgaaactgcaggagtcaggacctggcctggtggcgccctcacagagcctgtccgtcacatgcactgtctcaggggtctcattacccgactatggtgtaagctggattcgccagcctccacgaaagggtctggagtggctgggagtaatatggggtagtgaaaccacatactataattcagctctcaaatccagactgaccatcatcaaggacaactccaagagccaagttttcttaaaaatgaacagtctgcaaactgatgacacagccatttactactgtgccaaacattattactacggtggtagctatgctatggactactggggccaaggaacctcagtcaccgtctcctcaaccacgacgccagcgccgcgaccaccaacaccggcgcccaccatcgcgtcgcagcccctgtccctgcgcccagaggcgtgccggccagcggcggggggcgcagtgcacacgagggggctggacttcgcctgtgatatctacatctgggcgcccttggccgggacttgtggggtccttctcctgtcactggttatcaccctttactgcaaacggggcagaaagaaactcctgtatatattcaaacaaccatttatgagaccagtacaaactactcaagaggaagatggctgtagctgccgatttccagaagaagaagaaggaggatgtgaactgagagtgaagttcagcaggagcgcagacgcccccgcgtacaagcagggccagaaccagctctataacgagctcaatctaggacgaagagaggagtacgatgttttggacaagaggcgtggccgggaccctgagatggggggaaagccgagaaggaagaaccctcaggaaggcctgtacaatgaactgcagaaagataagatggcggaggcctacagtgagattgggatgaaaggcgagcgccggaggggcaaggggcacgatggcctttaccagggtctcagtacagccaccaaggacacctacgacgcccttcacatgcaggccctgccccctcgctaa

SEQ ID NO: 205 - protein, 485 aa, Artificial Sequence
  Synthesized
MALPVTALLLPLALLLHAARPDIVMTQSPSSLTVTAGEKVTMICKSSQSLLNSGDQKNYLTWYQQKPGQPPKLLIFWASTRESGVPDRFTGSGSGTDFTLTISSVQAEDLAVYYCQNDYSYPLTFGAGTKLELKGGGGSGGGGSGGGGSQVQLQQSDAELVKPGSSVKISCKASGYTFTDHAIHWVKQKPEQGLEWIGHFSPGNTDIKYNDKFKGKATLTVDRSSSTAYMQLNSLTSEDSAVYFCKTSTFFFDYWGQGTTLTVSSTTTPAPRPPTPAPTIASQPLSLRPEACRPAAGGAVHTRGLDFACDIYIWAPLAGTCGVLLLSLVITKRGRKKLLYIFKQPFMRPVQTTQEEDGCSCRFPEEEEGGCELRVKFSRSADAPAYQQGQNQLYNELNLGRREEYDVLDKRRGRDPEMGGKPRRKNPQEGLYNELQKDKMAEAYSEIGMKGERRRGKGHDGLYQGLSTATKDTYDALHMQALPPR

SEQ ID NO: 206 - DNA, 3524 bp, Artificial Sequence
  Synthesized
atggccttaccagtgaccgccttgctcctgccgctggccttgctgctccacgccgccaggccggatattgtgatgacccagtccccgtcctccctgaccgtgaccgcgggcgaaaaagtgaccatgatttgcaaatcctcccagtccctgctgaattccggcgatcagaaaaattatctgacctggtatcagcagaaaccgggccagccgccgaaactgctgattttttgggcgtccacccgtgaatccggcgtgccggatcgttttaccggctccggctccggcaccgattttaccctgaccatttcctccgtgcaggcggaagatctggcggtgtattattgccagaatgattattcctatccgctgacctttggcgcgggcaccaaactggaactgaaaggcggcggcggctccggcggcggcggctccggcggcggcggctcccaggtgcagctgcagcagtccgatgcggaactggtgaaaccgggctcctccgtgaaaatttcctgcaaagcgtccggctatacctttaccgatcatgcgattcattgggtgaaacagaaaccggaacagggcctggaatggattggccatttttccccgggcaataccgatattaaatataatgataaatttaaaggcaaagcgaccctgaccgtggatcgttcctcctccaccgcgtatatgcagctgaattccctgacctccgaagattccgcggtgtatttttgcaaaacctccacctttttttttgattattggggccagggcaccaccctgaccgtgtcctccaccacgacgccagcgccgcgaccaccaacaccggcgcccaccatcgcgtcgcagcccctgtccctgcgcccagaggcgtgccggccagcggcggggggcgcagtgcacacgagggggctggacttcgcctgtgatatctacatctgggcgcccttggccgggacttgtggggtccttctcctgtcactggttatcaccctttactgcaaacggggcagaaagaaactcctgtatatattcaaacaaccatttatgagaccagtacaaactactcaagaggaagatggctgtagctgccgatttccagaagaagaagaaggaggatgtgaactgagagtgaagttcagcaggagcgcagacgcccccgcgtacaagcagggccagaaccagctctataacgagctcaatctaggacgaagagaggagtacgatgttttggacaagaggcgtggccgggaccctgagatggggggaaagccgagaaggaagaaccctcaggaaggcctgtacaatgaactgcagaaagataagatggcggaggcctacagtgagattgggatgaaaggcgagcgccggaggggcaaggggcacgatggcctttaccagggtctcagtacagccaccaaggacacctacgacgcccttcacatgcaggccctgccccctcgctaatctagaggcgcgcccctctccctcccccccccctaacgttactggccgaagccgcttggaataaggccggtgtgcgtttgtctatatgttattttccaccatattgccgtcttttggcaatgtgagggcccggaaacctggccctgtcttcttgacgagcattcctaggggtctttcccctctcgccaaaggaatgcaaggtctgttgaatgtcgtgaaggaagcagttcctctggaagcttcttgaagacaaacaacgtctgtagcgaccctttgcaggcagcggaaccccccacctggcgacaggtgcctctgcggccaaaagccacgtgtataagatacacctgcaaaggcggcacaaccccagtgccacgttgtgagttggatagttgtggaaagagtcaaatggctctcctcaagcgtattcaacaaggggctgaaggatgcccagaaggtaccccattgtatgggatctgatctggggcctcggtacacatgctttacatgtgtttagtcgaggttaaaaaaacgtctaggccccccgaaccacggggacgtggttttcctttgaaaaacacgatgataatatggccacaacccatatgatggccttaccagtgaccgccttgctcctgccgctggccttgctgctccacgccgccaggccggacatccagatgacacagactacatcctccctgtctgcctctctgggagacagagtcaccatcagttgcagggcaagtcaggacattagtaaatatttaaattggtatcagcagaaaccagatggaactgttaaactcctgatctaccatacatcaagattacactcaggagtcccatcaaggttcagtggcagtgggtctggaacagattattctctcaccattagcaacctggagcaagaagatattgccacttacttttgccaacagggtaatacgcttccgtacacgttcggaggggggaccaagctggagatcacaggtggcggtggctcgggcggtggtgggtcgggtggcggcggatctgaggtgaaactgcaggagtcaggacctggcctggtggcgccctcacagagcctgtccgtcacatgcactgtctcaggggtctcattacccgactatggtgtaagctggattcgccagcctccacgaaagggtctggagtggctgggagtaatatggggtagtgaaaccacatactataattcagctctcaaatccagactgaccatcatcaaggacaactccaagagccaagttttcttaaaaatgaacagtctgcaaactgatgacacagccatttactactgtgccaaacattattactacggtggtagctatgctatggactactggggccaaggaacctcagtcaccgtctcctcaaccacgacgccagcgccgcgaccaccaacaccggcgcccaccatcgcgtcgcagcccctgtccctgcgcccagaggcgtgccggccagcggcggggggcgcagtgcacacgagggggctggacttcgcctgtgatatctacatctgggcgcccttggccgggacttgtggggtccttctcctgtcactggttatcaccaaacggggcagaaagaaactcctgtatatattcaaacaaccatttatgagaccagtacaaactactcaagaggaagatggctgtagctgccgatttccagaagaagaagaaggaggatgtgaactgagagtgaagttcagcaggagcgcagacgcccccgcgtacaagcagggccagaaccagctctataacgagctcaatctaggacgaagagaggagtacgatgttttggacaagaggcgtggccgggaccctgagatggggggaaagccgagaaggaagaaccctcaggaaggcctgtacaatgaactgcagaaagataagatggcggaggcctacagtgagattgggatgaaaggcgagcgccggaggggcaaggggcacgatggcctttaccagggtctcagtacagccaccaaggacacctacgacgcccttcacatgcaggccctgccccctcgctaa

SEQ ID NO: 207 - protein, 483 aa, Artificial Sequence
  Synthesized
MALPVTALLLPLALLLHAARPDIQMTQTTSSLSASLGDRVTISCRASQDISKYLNWYQQKPDGTVKLLIYHTSRLHSGVPSRFSGSGSGTDYSLTISNLEQEDIATYFCQQGNTLPYTFGGGTKLEITGGGGSGGGGSGGGGSEVKLQESGPGLVAPSQSLSVTCTVSGVSLPDYGVSWIRQPPRKGLEWLGVIWGSETTYYNSALKSRLTIIKDNSKSQVFLKMNSLQTDDTAIYYCAKHYYYGGSYAMDYWGQGTSVTVSSTTTPAPRPPTPAPTIASQPLSLRPEACRPAAGGAVHTRGLDFACDIYIWAPLAGTCGVLLLSLVITKRGRKKLLYIFKQPFMRPVQTTQEEDGCSCRFPEEEEGGCELRVKFSRSADAPAYQQGQNQLYNELNLGRREEYDVLDKRRGRDPEMGGKPRRKNPQEGLYNELQKDKMAEAYSEIGMKGERRRGKGHDGLYQGLSTATKDTYDALHMQALPPR

SEQ ID NO: 208 - DNA, 3515 bp, Artificial Sequence
  Synthesized
atggccttaccagtgaccgccttgctcctgccgctggccttgctgctccacgccgccaggccggatattgtgatgacccagtccccgtcctccctgaccgtgaccgcgggcgaaaaagtgaccatgatttgcaaatcctcccagtccctgctgaattccggcgatcagaaaaattatctgacctggtatcagcagaaaccgggccagccgccgaaactgctgattttttgggcgtccacccgtgaatccggcgtgccggatcgttttaccggctccggctccggcaccgattttaccctgaccatttcctccgtgcaggcggaagatctggcggtgtattattgccagaatgattattcctatccgctgacctttggcgcgggcaccaaactggaactgaaaggcggcggcggctccggcggcggcggctccggcggcggcggctcccaggtgcagctgcagcagtccgatgcggaactggtgaaaccgggctcctccgtgaaaatttcctgcaaagcgtccggctatacctttaccgatcatgcgattcattgggtgaaacagaaaccggaacagggcctggaatggattggccatttttccccgggcaataccgatattaaatataatgataaatttaaaggcaaagcgaccctgaccgtggatcgttcctcctccaccgcgtatatgcagctgaattccctgacctccgaagattccgcggtgtatttttgcaaaacctccacctttttttttgattattggggccagggcaccaccctgaccgtgtcctccaccacgacgccagcgccgcgaccaccaacaccggcgcccaccatcgcgtcgcagcccctgtccctgcgcccagaggcgtgccggccagcggcggggggcgcagtgcacacgagggggctggacttcgcctgtgatatctacatctgggcgcccttggccgggacttgtggggtccttctcctgtcactggttatcaccaaacggggcagaaagaaactcctgtatatattcaaacaaccatttatgagaccagtacaaactactcaagaggaagatggctgtagctgccgatttccagaagaagaagaaggaggatgtgaactgagagtgaagttcagcaggagcgcagacgcccccgcgtacaagcagggccagaaccagctctataacgagctcaatctaggacgaagagaggagtacgatgttttggacaagaggcgtggccgggaccctgagatggggggaaagccgagaaggaagaaccctcaggaaggcctgtacaatgaactgcagaaagataagatggcggaggcctacagtgagattgggatgaaaggcgagcgccggaggggcaaggggcacgatggcctttaccagggtctcagtacagccaccaaggacacctacgacgcccttcacatgcaggccctgccccctcgctaatctagaggcgcgcccctctccctcccccccccctaacgttactggccgaagccgcttggaataaggccggtgtgcgtttgtctatatgttattttccaccatattgccgtcttttggcaatgtgagggcccggaaacctggccctgtcttcttgacgagcattcctaggggtctttcccctctcgccaaaggaatgcaaggtctgttgaatgtcgtgaaggaagcagttcctctggaagcttcttgaagacaaacaacgtctgtagcgaccctttgcaggcagcggaaccccccacctggcgacaggtgcctctgcggccaaaagccacgtgtataagatacacctgcaaaggcggcacaaccccagtgccacgttgtgagttggatagttgtggaaagagtcaaatggctctcctcaagcgtattcaacaaggggctgaaggatgcccagaaggtaccccattgtatgggatctgatctggggcctcggtacacatgctttacatgtgtttagtcgaggttaaaaaaacgtctaggccccccgaaccacggggacgtggttttcctttgaaaaacacgatgataatatggccacaacccatatgatggccttaccagtgaccgccttgctcctgccgctggccttgctgctccacgccgccaggccggacatccagatgacacagactacatcctccctgtctgcctctctgggagacagagtcaccatcagttgcagggcaagtcaggacattagtaaatatttaaattggtatcagcagaaaccagatggaactgttaaactcctgatctaccatacatcaagattacactcaggagtcccatcaaggttcagtggcagtgggtctggaacagattattctctcaccattagcaacctggagcaagaagatattgccacttacttttgccaacagggtaatacgcttccgtacacgttcggaggggggaccaagctggagatcacaggtggcggtggctcgggcggtggtgggtcgggtggcggcggatctgaggtgaaactgcaggagtcaggacctggcctggtggcgccctcacagagcctgtccgtcacatgcactgtctcaggggtctcattacccgactatggtgtaagctggattcgccagcctccacgaaagggtctggagtggctgggagtaatatggggtagtgaaaccacatactataattcagctctcaaatccagactgaccatcatcaaggacaactccaagagccaagttttcttaaaaatgaacagtctgcaaactgatgacacagccatttactactgtgccaaacattattactacggtggtagctatgctatggactactggggccaaggaacctcagtcaccgtctcctcaaccacgacgccagcgccgcgaccaccaacaccggcgcccaccatcgcgtcgcagcccctgtccctgcgcccagaggcgtgccggccagcggcggggggcgcagtgcacacgagggggctggacttcgcctgtgatatctacatctgggcgcccttggccgggacttgtggggtccttctcctgtcactggttatcaccaaacggggcagaaagaaactcctgtatatattcaaacaaccatttatgagaccagtacaaactactcaagaggaagatggctgtagctgccgatttccagaagaagaagaaggaggatgtgaactgagagtgaagttcagcaggagcgcagacgcccccgcgtacaagcagggccagaaccagctctataacgagctcaatctaggacgaagagaggagtacgatgttttggacaagaggcgtggccgggaccctgagatggggggaaagccgagaaggaagaaccctcaggaaggcctgtacaatgaactgcagaaagataagatggcggaggcctacagtgagattgggatgaaaggcgagcgccggaggggcaaggggcacgatggcctttaccagggtctcagtacagccaccaaggacacctacgacgcccttcacatgcaggccctgccccctcgctaa

SEQ ID NO: 209 - DNA, 3533 bp, Artificial Sequence
  Synthesized
atggccttaccagtgaccgccttgctcctgccgctggccttgctgctccacgccgccaggccggacatcgtgatgacccagtccccctccagcctgacagtgacagccggcgagaaggtgacaatgatctgtaagtccagccagagcctgctgaacagcggcgaccagaagaactacctgacctggtaccagcagaagcctggccagccccccaagctgctgatcttctgggccagcacaagggagagcggcgtgcccgacagattcacaggcagcggcagcggcaccgacttcacactgaccatttcctccgtgcaggccgaggacctcgccgtgtactactgccagaacgactactcctaccccctgacattcggcgccggcaccaaactggagctgaagggtggcggtggctcgggcggtggtgggtcgggtggcggcggatctcaggtgcagctccagcagtccgatgccgagctggtgaagcccggaagcagcgtcaagatcagctgtaaggcctccggctacaccttcacagaccacgccatccactgggtgaagcagaagcccgagcagggcctggagtggatcggccactttagccccggaaacaccgacatcaagtacaacgacaagttcaagggcaaggccaccctgaccgtggacaggagcagcagcaccgcctacatgcagctgaacagcctgacaagcgaggacagcgccgtgtacttctgcaagacctccaccttcttcttcgactactggggccagggaaccaccctgacagtgtccagcaccacgacgccagcgccgcgaccaccaacaccggcgcccaccatcgcgtcgcagcccctgtccctgcgcccagaggcgtgccggccagcggcggggggcgcagtgcacacgagggggctggacttcgcctgtgatatctacatctgggcgcccttggccgggacttgtggggtccttctcctgtcactggttatcaccctttactgcaaacggggcagaaagaaactcctgtatatattcaaacaaccatttatgagaccagtacaaactactcaagaggaagatggctgtagctgccgatttccagaagaagaagaaggaggatgtgaactgagagtgaagttcagcaggagcgcagacgcccccgcgtacaagcagggccagaaccagctctataacgagctcaatctaggacgaagagaggagtacgatgttttggacaagaggcgtggccgggaccctgagatggggggaaagccgagaaggaagaaccctcaggaaggcctgtacaatgaactgcagaaagataagatggcggaggcctacagtgagattgggatgaaaggcgagcgccggaggggcaaggggcacgatggcctttaccagggtctcagtacagccaccaaggacacctacgacgcccttcacatgcaggccctgccccctcgctaatctagaggcgcgcccctctccctcccccccccctaacgttactggccgaagccgcttggaataaggccggtgtgcgtttgtctatatgttattttccaccatattgccgtcttttggcaatgtgagggcccggaaacctggccctgtcttcttgacgagcattcctaggggtctttcccctctcgccaaaggaatgcaaggtctgttgaatgtcgtgaaggaagcagttcctctggaagcttcttgaagacaaacaacgtctgtagcgaccctttgcaggcagcggaaccccccacctggcgacaggtgcctctgcggccaaaagccacgtgtataagatacacctgcaaaggcggcacaaccccagtgccacgttgtgagttggatagttgtggaaagagtcaaatggctctcctcaagcgtattcaacaaggggctgaaggatgcccagaaggtaccccattgtatgggatctgatctggggcctcggtacacatgctttacatgtgtttagtcgaggttaaaaaaacgtctaggccccccgaaccacggggacgtggttttcctttgaaaaacacgatgataatatggccacaacccatatgatggccttaccagtgaccgccttgctcctgccgctggccttgctgctccacgccgccaggccggacatccagatgacacagactacatcctccctgtctgcctctctgggagacagagtcaccatcagttgcagggcaagtcaggacattagtaaatatttaaattggtatcagcagaaaccagatggaactgttaaactcctgatctaccatacatcaagattacactcaggagtcccatcaaggttcagtggcagtgggtctggaacagattattctctcaccattagcaacctggagcaagaagatattgccacttacttttgccaacagggtaatacgcttccgtacacgttcggaggggggaccaagctggagatcacaggtggcggtggctcgggcggtggtgggtcgggtggcggcggatctgaggtgaaactgcaggagtcaggacctggcctggtggcgccctcacagagcctgtccgtcacatgcactgtctcaggggtctcattacccgactatggtgtaagctggattcgccagcctccacgaaagggtctggagtggctgggagtaatatggggtagtgaaaccacatactataattcagctctcaaatccagactgaccatcatcaaggacaactccaagagccaagttttcttaaaaatgaacagtctgcaaactgatgacacagccatttactactgtgccaaacattattactacggtggtagctatgctatggactactggggccaaggaacctcagtcaccgtctcctcaaccacgacgccagcgccgcgaccaccaacaccggcgcccaccatcgcgtcgcagcccctgtccctgcgcccagaggcgtgccggccagcggcggggggcgcagtgcacacgagggggctggacttcgcctgtgatatctacatctgggcgcccttggccgggacttgtggggtccttctcctgtcactggttatcaccctttactgcaaacggggcagaaagaaactcctgtatatattcaaacaaccatttatgagaccagtacaaactactcaagaggaagatggctgtagctgccgatttccagaagaagaagaaggaggatgtgaactgagagtgaagttcagcaggagcgcagacgcccccgcgtacaagcagggccagaaccagctctataacgagctcaatctaggacgaagagaggagtacgatgttttggacaagaggcgtggccgggaccctgagatggggggaaagccgagaaggaagaaccctcaggaaggcctgtacaatgaactgcagaaagataagatggcggaggcctacagtgagattgggatgaaaggcgagcgccggaggggcaaggggcacgatggcctttaccagggtctcagtacagccaccaaggacacctacgacgcccttcacatgcaggccctgccccctcgctaa

SEQ ID NO: 210 - protein, 490 aa, Artificial Sequence
  Synthesized
MALPVTALLLPLALLLHAARPDIVMTQAAFSNPVTLGTSASISCRSSKSLLHSNGITYFFWYLQKPGLSPQLLIYQMSNLASGVPDRFSSSGSGTDFTLRISRVEAEDVGVYYCAQNLELPPTFGGGTKLEIKRAGGGGSGGGGSGGGGSEVKLVESGGGLVQPGGSMKLSCVASGFTFSNYWMNWVRQSPEKGLEWVAEIRLKSNNYTTHYAESVKGRFTISRDDSKSSVSLQMNNLRVEDTGIYYCTRHYYFDYWGQGTTLTVSSTTTPAPRPPTPAPTIASQPLSLRPEACRPAAGGAVHTRGLDFACDIYIWAPLAGTCGVLLLSLVITLYCKRGRKKLLYIFKQPFMRPVQTTQEEDGCSCRFPEEEEGGCELRVKFSRSADAPAYQQGQNQLYNELNLGRREEYDVLDKRRGRDPEMGGKPRRKNPQEGLYNELQKDKMAEAYSEIGMKGERRRGKGHDGLYQGLSTATKDTYDALHMQALPPR

SEQ ID NO: 211 - DNA, 3524 bp, Artificial Sequence
  Synthesized
atggccttaccagtgaccgccttgctcctgccgctggccttgctgctccacgccgccaggccggacatcgtgatgacccagtccccctccagcctgacagtgacagccggcgagaaggtgacaatgatctgtaagtccagccagagcctgctgaacagcggcgaccagaagaactacctgacctggtaccagcagaagcctggccagccccccaagctgctgatcttctgggccagcacaagggagagcggcgtgcccgacagattcacaggcagcggcagcggcaccgacttcacactgaccatttcctccgtgcaggccgaggacctcgccgtgtactactgccagaacgactactcctaccccctgacattcggcgccggcaccaaactggagctgaagggtggcggtggctcgggcggtggtgggtcgggtggcggcggatctcaggtgcagctccagcagtccgatgccgagctggtgaagcccggaagcagcgtcaagatcagctgtaaggcctccggctacaccttcacagaccacgccatccactgggtgaagcagaagcccgagcagggcctggagtggatcggccactttagccccggaaacaccgacatcaagtacaacgacaagttcaagggcaaggccaccctgaccgtggacaggagcagcagcaccgcctacatgcagctgaacagcctgacaagcgaggacagcgccgtgtacttctgcaagacctccaccttcttcttcgactactggggccagggaaccaccctgacagtgtccagcaccacgacgccagcgccgcgaccaccaacaccggcgcccaccatcgcgtcgcagcccctgtccctgcgcccagaggcgtgccggccagcggcggggggcgcagtgcacacgagggggctggacttcgcctgtgatatctacatctgggcgcccttggccgggacttgtggggtccttctcctgtcactggttatcaccaaacggggcagaaagaaactcctgtatatattcaaacaaccatttatgagaccagtacaaactactcaagaggaagatggctgtagctgccgatttccagaagaagaagaaggaggatgtgaactgagagtgaagttcagcaggagcgcagacgcccccgcgtacaagcagggccagaaccagctctataacgagctcaatctaggacgaagagaggagtacgatgttttggacaagaggcgtggccgggaccctgagatggggggaaagccgagaaggaagaaccctcaggaaggcctgtacaatgaactgcagaaagataagatggcggaggcctacagtgagattgggatgaaaggcgagcgccggaggggcaaggggcacgatggcctttaccagggtctcagtacagccaccaaggacacctacgacgcccttcacatgcaggccctgccccctcgctaatctagaggcgcgcccctctccctcccccccccctaacgttactggccgaagccgcttggaataaggccggtgtgcgtttgtctatatgttattttccaccatattgccgtcttttggcaatgtgagggcccggaaacctggccctgtcttcttgacgagcattcctaggggtctttcccctctcgccaaaggaatgcaaggtctgttgaatgtcgtgaaggaagcagttcctctggaagcttcttgaagacaaacaacgtctgtagcgaccctttgcaggcagcggaaccccccacctggcgacaggtgcctctgcggccaaaagccacgtgtataagatacacctgcaaaggcggcacaaccccagtgccacgttgtgagttggatagttgtggaaagagtcaaatggctctcctcaagcgtattcaacaaggggctgaaggatgcccagaaggtaccccattgtatgggatctgatctggggcctcggtacacatgctttacatgtgtttagtcgaggttaaaaaaacgtctaggccccccgaaccacggggacgtggttttcctttgaaaaacacgatgataatatggccacaacccatatgatggccttaccagtgaccgccttgctcctgccgctggccttgctgctccacgccgccaggccggacatccagatgacacagactacatcctccctgtctgcctctctgggagacagagtcaccatcagttgcagggcaagtcaggacattagtaaatatttaaattggtatcagcagaaaccagatggaactgttaaactcctgatctaccatacatcaagattacactcaggagtcccatcaaggttcagtggcagtgggtctggaacagattattctctcaccattagcaacctggagcaagaagatattgccacttacttttgccaacagggtaatacgcttccgtacacgttcggaggggggaccaagctggagatcacaggtggcggtggctcgggcggtggtgggtcgggtggcggcggatctgaggtgaaactgcaggagtcaggacctggcctggtggcgccctcacagagcctgtccgtcacatgcactgtctcaggggtctcattacccgactatggtgtaagctggattcgccagcctccacgaaagggtctggagtggctgggagtaatatggggtagtgaaaccacatactataattcagctctcaaatccagactgaccatcatcaaggacaactccaagagccaagttttcttaaaaatgaacagtctgcaaactgatgacacagccatttactactgtgccaaacattattactacggtggtagctatgctatggactactggggccaaggaacctcagtcaccgtctcctcaaccacgacgccagcgccgcgaccaccaacaccggcgcccaccatcgcgtcgcagcccctgtccctgcgcccagaggcgtgccggccagcggcggggggcgcagtgcacacgagggggctggacttcgcctgtgatatctacatctgggcgcccttggccgggacttgtggggtccttctcctgtcactggttatcaccctttactgcaaacggggcagaaagaaactcctgtatatattcaaacaaccatttatgagaccagtacaaactactcaagaggaagatggctgtagctgccgatttccagaagaagaagaaggaggatgtgaactgagagtgaagttcagcaggagcgcagacgcccccgcgtacaagcagggccagaaccagctctataacgagctcaatctaggacgaagagaggagtacgatgttttggacaagaggcgtggccgggaccctgagatggggggaaagccgagaaggaagaaccctcaggaaggcctgtacaatgaactgcagaaagataagatggcggaggcctacagtgagattgggatgaaaggcgagcgccggaggggcaaggggcacgatggcctttaccagggtctcagtacagccaccaaggacacctacgacgcccttcacatgcaggccctgccccctcgctaa

SEQ ID NO: 212 - protein, 487 aa, Artificial Sequence
  Synthesized
MALPVTALLLPLALLLHAARPDIVMTQAAFSNPVTLGTSASISCRSSKSLLHSNGITYFFWYLQKPGLSPQLLIYQMSNLASGVPDRFSSSGSGTDFTLRISRVEAEDVGVYYCAQNLELPPTFGGGTKLEIKRAGGGGSGGGGSGGGGSEVKLVESGGGLVQPGGSMKLSCVASGFTFSNYWMNWVRQSPEKGLEWVAEIRLKSNNYTTHYAESVKGRFTISRDDSKSSVSLQMNNLRVEDTGIYYCTRHYYFDYWGQGTTLTVSSTTTPAPRPPTPAPTIASQPLSLRPEACRPAAGGAVHTRGLDFACDIYIWAPLAGTCGVLLLSLVITKRGRKKLLYIFKQPFMRPVQTTQEEDGCSCRFPEEEEGGCELRVKFSRSADAPAYQQGQNQLYNELNLGRREEYDVLDKRRGRDPEMGGKPRRKNPQEGLYNELQKDKMAEAYSEIGMKGERRRGKGHDGLYQGLSTATKDTYDALHMQALPPR

SEQ ID NO: 213 - DNA, 3524 bp, Artificial Sequence
  Synthesized
atggccttaccagtgaccgccttgctcctgccgctggccttgctgctccacgccgccaggccggacatcgtgatgacccagtccccctccagcctgacagtgacagccggcgagaaggtgacaatgatctgtaagtccagccagagcctgctgaacagcggcgaccagaagaactacctgacctggtaccagcagaagcctggccagccccccaagctgctgatcttctgggccagcacaagggagagcggcgtgcccgacagattcacaggcagcggcagcggcaccgacttcacactgaccatttcctccgtgcaggccgaggacctcgccgtgtactactgccagaacgactactcctaccccctgacattcggcgccggcaccaaactggagctgaagggtggcggtggctcgggcggtggtgggtcgggtggcggcggatctcaggtgcagctccagcagtccgatgccgagctggtgaagcccggaagcagcgtcaagatcagctgtaaggcctccggctacaccttcacagaccacgccatccactgggtgaagcagaagcccgagcagggcctggagtggatcggccactttagccccggaaacaccgacatcaagtacaacgacaagttcaagggcaaggccaccctgaccgtggacaggagcagcagcaccgcctacatgcagctgaacagcctgacaagcgaggacagcgccgtgtacttctgcaagacctccaccttcttcttcgactactggggccagggaaccaccctgacagtgtccagcaccacgacgccagcgccgcgaccaccaacaccggcgcccaccatcgcgtcgcagcccctgtccctgcgcccagaggcgtgccggccagcggcggggggcgcagtgcacacgagggggctggacttcgcctgtgatatctacatctgggcgcccttggccgggacttgtggggtccttctcctgtcactggttatcaccctttactgcaaacggggcagaaagaaactcctgtatatattcaaacaaccatttatgagaccagtacaaactactcaagaggaagatggctgtagctgccgatttccagaagaagaagaaggaggatgtgaactgagagtgaagttcagcaggagcgcagacgcccccgcgtacaagcagggccagaaccagctctataacgagctcaatctaggacgaagagaggagtacgatgttttggacaagaggcgtggccgggaccctgagatggggggaaagccgagaaggaagaaccctcaggaaggcctgtacaatgaactgcagaaagataagatggcggaggcctacagtgagattgggatgaaaggcgagcgccggaggggcaaggggcacgatggcctttaccagggtctcagtacagccaccaaggacacctacgacgcccttcacatgcaggccctgccccctcgctaatctagaggcgcgcccctctccctcccccccccctaacgttactggccgaagccgcttggaataaggccggtgtgcgtttgtctatatgttattttccaccatattgccgtcttttggcaatgtgagggcccggaaacctggccctgtcttcttgacgagcattcctaggggtctttcccctctcgccaaaggaatgcaaggtctgttgaatgtcgtgaaggaagcagttcctctggaagcttcttgaagacaaacaacgtctgtagcgaccctttgcaggcagcggaaccccccacctggcgacaggtgcctctgcggccaaaagccacgtgtataagatacacctgcaaaggcggcacaaccccagtgccacgttgtgagttggatagttgtggaaagagtcaaatggctctcctcaagcgtattcaacaaggggctgaaggatgcccagaaggtaccccattgtatgggatctgatctggggcctcggtacacatgctttacatgtgtttagtcgaggttaaaaaaacgtctaggccccccgaaccacggggacgtggttttcctttgaaaaacacgatgataatatggccacaacccatatgatggccttaccagtgaccgccttgctcctgccgctggccttgctgctccacgccgccaggccggacatccagatgacacagactacatcctccctgtctgcctctctgggagacagagtcaccatcagttgcagggcaagtcaggacattagtaaatatttaaattggtatcagcagaaaccagatggaactgttaaactcctgatctaccatacatcaagattacactcaggagtcccatcaaggttcagtggcagtgggtctggaacagattattctctcaccattagcaacctggagcaagaagatattgccacttacttttgccaacagggtaatacgcttccgtacacgttcggaggggggaccaagctggagatcacaggtggcggtggctcgggcggtggtgggtcgggtggcggcggatctgaggtgaaactgcaggagtcaggacctggcctggtggcgccctcacagagcctgtccgtcacatgcactgtctcaggggtctcattacccgactatggtgtaagctggattcgccagcctccacgaaagggtctggagtggctgggagtaatatggggtagtgaaaccacatactataattcagctctcaaatccagactgaccatcatcaaggacaactccaagagccaagttttcttaaaaatgaacagtctgcaaactgatgacacagccatttactactgtgccaaacattattactacggtggtagctatgctatggactactggggccaaggaacctcagtcaccgtctcctcaaccacgacgccagcgccgcgaccaccaacaccggcgcccaccatcgcgtcgcagcccctgtccctgcgcccagaggcgtgccggccagcggcggggggcgcagtgcacacgagggggctggacttcgcctgtgatatctacatctgggcgcccttggccgggacttgtggggtccttctcctgtcactggttatcaccaaacggggcagaaagaaactcctgtatatattcaaacaaccatttatgagaccagtacaaactactcaagaggaagatggctgtagctgccgatttccagaagaagaagaaggaggatgtgaactgagagtgaagttcagcaggagcgcagacgcccccgcgtacaagcagggccagaaccagctctataacgagctcaatctaggacgaagagaggagtacgatgttttggacaagaggcgtggccgggaccctgagatggggggaaagccgagaaggaagaaccctcaggaaggcctgtacaatgaactgcagaaagataagatggcggaggcctacagtgagattgggatgaaaggcgagcgccggaggggcaaggggcacgatggcctttaccagggtctcagtacagccaccaaggacacctacgacgcccttcacatgcaggccctgccccctcgctaa

SEQ ID NO: 214 - DNA, 3515 bp, Artificial Sequence
  Synthesized
atggccttaccagtgaccgccttgctcctgccgctggccttgctgctccacgccgccaggccggacatcgtgatgacccagtccccctccagcctgacagtgacagccggcgagaaggtgacaatgatctgtaagtccagccagagcctgctgaacagcggcgaccagaagaactacctgacctggtaccagcagaagcctggccagccccccaagctgctgatcttctgggccagcacaagggagagcggcgtgcccgacagattcacaggcagcggcagcggcaccgacttcacactgaccatttcctccgtgcaggccgaggacctcgccgtgtactactgccagaacgactactcctaccccctgacattcggcgccggcaccaaactggagctgaagggtggcggtggctcgggcggtggtgggtcgggtggcggcggatctcaggtgcagctccagcagtccgatgccgagctggtgaagcccggaagcagcgtcaagatcagctgtaaggcctccggctacaccttcacagaccacgccatccactgggtgaagcagaagcccgagcagggcctggagtggatcggccactttagccccggaaacaccgacatcaagtacaacgacaagttcaagggcaaggccaccctgaccgtggacaggagcagcagcaccgcctacatgcagctgaacagcctgacaagcgaggacagcgccgtgtacttctgcaagacctccaccttcttcttcgactactggggccagggaaccaccctgacagtgtccagcaccacgacgccagcgccgcgaccaccaacaccggcgcccaccatcgcgtcgcagcccctgtccctgcgcccagaggcgtgccggccagcggcggggggcgcagtgcacacgagggggctggacttcgcctgtgatatctacatctgggcgcccttggccgggacttgtggggtccttctcctgtcactggttatcaccaaacggggcagaaagaaactcctgtatatattcaaacaaccatttatgagaccagtacaaactactcaagaggaagatggctgtagctgccgatttccagaagaagaagaaggaggatgtgaactgagagtgaagttcagcaggagcgcagacgcccccgcgtacaagcagggccagaaccagctctataacgagctcaatctaggacgaagagaggagtacgatgttttggacaagaggcgtggccgggaccctgagatggggggaaagccgagaaggaagaaccctcaggaaggcctgtacaatgaactgcagaaagataagatggcggaggcctacagtgagattgggatgaaaggcgagcgccggaggggcaaggggcacgatggcctttaccagggtctcagtacagccaccaaggacacctacgacgcccttcacatgcaggccctgccccctcgctaatctagaggcgcgcccctctccctcccccccccctaacgttactggccgaagccgcttggaataaggccggtgtgcgtttgtctatatgttattttccaccatattgccgtcttttggcaatgtgagggcccggaaacctggccctgtcttcttgacgagcattcctaggggtctttcccctctcgccaaaggaatgcaaggtctgttgaatgtcgtgaaggaagcagttcctctggaagcttcttgaagacaaacaacgtctgtagcgaccctttgcaggcagcggaaccccccacctggcgacaggtgcctctgcggccaaaagccacgtgtataagatacacctgcaaaggcggcacaaccccagtgccacgttgtgagttggatagttgtggaaagagtcaaatggctctcctcaagcgtattcaacaaggggctgaaggatgcccagaaggtaccccattgtatgggatctgatctggggcctcggtacacatgctttacatgtgtttagtcgaggttaaaaaaacgtctaggccccccgaaccacggggacgtggttttcctttgaaaaacacgatgataatatggccacaacccatatgatggccttaccagtgaccgccttgctcctgccgctggccttgctgctccacgccgccaggccggacatccagatgacacagactacatcctccctgtctgcctctctgggagacagagtcaccatcagttgcagggcaagtcaggacattagtaaatatttaaattggtatcagcagaaaccagatggaactgttaaactcctgatctaccatacatcaagattacactcaggagtcccatcaaggttcagtggcagtgggtctggaacagattattctctcaccattagcaacctggagcaagaagatattgccacttacttttgccaacagggtaatacgcttccgtacacgttcggaggggggaccaagctggagatcacaggtggcggtggctcgggcggtggtgggtcgggtggcggcggatctgaggtgaaactgcaggagtcaggacctggcctggtggcgccctcacagagcctgtccgtcacatgcactgtctcaggggtctcattacccgactatggtgtaagctggattcgccagcctccacgaaagggtctggagtggctgggagtaatatggggtagtgaaaccacatactataattcagctctcaaatccagactgaccatcatcaaggacaactccaagagccaagttttcttaaaaatgaacagtctgcaaactgatgacacagccatttactactgtgccaaacattattactacggtggtagctatgctatggactactggggccaaggaacctcagtcaccgtctcctcaaccacgacgccagcgccgcgaccaccaacaccggcgcccaccatcgcgtcgcagcccctgtccctgcgcccagaggcgtgccggccagcggcggggggcgcagtgcacacgagggggctggacttcgcctgtgatatctacatctgggcgcccttggccgggacttgtggggtccttctcctgtcactggttatcaccaaacggggcagaaagaaactcctgtatatattcaaacaaccatttatgagaccagtacaaactactcaagaggaagatggctgtagctgccgatttccagaagaagaagaaggaggatgtgaactgagagtgaagttcagcaggagcgcagacgcccccgcgtacaagcagggccagaaccagctctataacgagctcaatctaggacgaagagaggagtacgatgttttggacaagaggcgtggccgggaccctgagatggggggaaagccgagaaggaagaaccctcaggaaggcctgtacaatgaactgcagaaagataagatggcggaggcctacagtgagattgggatgaaaggcgagcgccggaggggcaaggggcacgatggcctttaccagggtctcagtacagccaccaaggacacctacgacgcccttcacatgcaggccctgccccctcgctaa

SEQ ID NO: 215 - DNA, 3533 bp, Artificial Sequence
  Synthesized
atggccttaccagtgaccgccttgctcctgccgctggccttgctgctccacgccgccaggccggatattgtgatgacccagtccccgtcctccctgaccgtgaccgcgggcgaaaaagtgaccatgatttgcaaatcctcccagtccctgctgaattccggcgatcagaaaaattatctgacctggtatcagcagaaaccgggccagccgccgaaactgctgattttttgggcgtccacccgtgaatccggcgtgccggatcgttttaccggctccggctccggcaccgattttaccctgaccatttcctccgtgcaggcggaagatctggcggtgtattattgccagaatgattattcctatccgctgacctttggcgcgggcaccaaactggaactgaaaggcggcggcggctccggcggcggcggctccggcggcggcggctcccaggtgcagctgcagcagtccgatgcggaactggtgaaaccgggctcctccgtgaaaatttcctgcaaagcgtccggctatacctttaccgatcatgcgattcattgggtgaaacagaaaccggaacagggcctggaatggattggccatttttccccgggcaataccgatattaaatataatgataaatttaaaggcaaagcgaccctgaccgtggatcgttcctcctccaccgcgtatatgcagctgaattccctgacctccgaagattccgcggtgtatttttgcaaaacctccacctttttttttgattattggggccagggcaccaccctgaccgtgtcctccaccacgacgccagcgccgcgaccaccaacaccggcgcccaccatcgcgtcgcagcccctgtccctgcgcccagaggcgtgccggccagcggcggggggcgcagtgcacacgagggggctggacttcgcctgtgatatctacatctgggcgcccttggccgggacttgtggggtccttctcctgtcactggttatcaccctttactgcaaacggggcagaaagaaactcctgtatatattcaaacaaccatttatgagaccagtacaaactactcaagaggaagatggctgtagctgccgatttccagaagaagaagaaggaggatgtgaactgagagtgaagttcagcaggagcgcagacgcccccgcgtacaagcagggccagaaccagctctataacgagctcaatctaggacgaagagaggagtacgatgttttggacaagaggcgtggccgggaccctgagatggggggaaagccgagaaggaagaaccctcaggaaggcctgtacaatgaactgcagaaagataagatggcggaggcctacagtgagattgggatgaaaggcgagcgccggaggggcaaggggcacgatggcctttaccagggtctcagtacagccaccaaggacacctacgacgcccttcacatgcaggccctgccccctcgctaatctagaggcgcgcccctctccctcccccccccctaacgttactggccgaagccgcttggaataaggccggtgtgcgtttgtctatatgttattttccaccatattgccgtcttttggcaatgtgagggcccggaaacctggccctgtcttcttgacgagcattcctaggggtctttcccctctcgccaaaggaatgcaaggtctgttgaatgtcgtgaaggaagcagttcctctggaagcttcttgaagacaaacaacgtctgtagcgaccctttgcaggcagcggaaccccccacctggcgacaggtgcctctgcggccaaaagccacgtgtataagatacacctgcaaaggcggcacaaccccagtgccacgttgtgagttggatagttgtggaaagagtcaaatggctctcctcaagcgtattcaacaaggggctgaaggatgcccagaaggtaccccattgtatgggatctgatctggggcctcggtacacatgctttacatgtgtttagtcgaggttaaaaaaacgtctaggccccccgaaccacggggacgtggttttcctttgaaaaacacgatgataatatggccacaacccatatgatggccttaccagtgaccgccttgctcctgccgctggccttgctgctccacgccgccaggccggatatccagatgacccagagcccgagcagcctgagcgcgagcgtgggtgatcgcgtgaccattacctgcagggcaagtcaggacattagtaaatatttaaattggtatcagcagaaaccgggtaaagcgccgaaactgttaatttatcatacatcaagattacactcaggcgtgccgtcgcgttttagcggctcgggttcgggcaccgattttaccctgaccatctcgagcttgcagccggaggacttcgccacctactattgccaacagggtaatacgcttccgtacacgttcggtcagggcaccaaagtggagatcaaaggtggcggtggctcgggcggtggtgggtcgggtggcggcggatctgaggtgcagctggtggagtctgggggaggcttggtacagcctggggggtccctgagactctcctgtgcagcctctggagtgtccctgcctgattatggcgtgtcctgggtccgccaggctccagggaaggggctggagtgggtttcagtgatctggggcagcgagacaacctactacaacagcgccctgaagtcccgattcaccatctccagagacaatgccaagaactcactgtatctgcaaatgaacagcctgagagccgaggacacggctgtgtattactgtgcgaagcactactactacggcggcagctacgctatggactactggggccaaggaaccctggtcaccgtgtcctcaaccacgacgccagcgccgcgaccaccaacaccggcgcccaccatcgcgtcgcagcccctgtccctgcgcccagaggcgtgccggccagcggcggggggcgcagtgcacacgagggggctggacttcgcctgtgatatctacatctgggcgcccttggccgggacttgtggggtccttctcctgtcactggttatcaccctttactgcaaacggggcagaaagaaactcctgtatatattcaaacaaccatttatgagaccagtacaaactactcaagaggaagatggctgtagctgccgatttccagaagaagaagaaggaggatgtgaactgagagtgaagttcagcaggagcgcagacgcccccgcgtacaagcagggccagaaccagctctataacgagctcaatctaggacgaagagaggagtacgatgttttggacaagaggcgtggccgggaccctgagatggggggaaagccgagaaggaagaaccctcaggaaggcctgtacaatgaactgcagaaagataagatggcggaggcctacagtgagattgggatgaaaggcgagcgccggaggggcaaggggcacgatggcctttaccagggtctcagtacagccaccaaggacacctacgacgcccttcacatgcaggccctgccccctcgctaa

SEQ ID NO: 216 - protein, 486 aa, Artificial Sequence
  Synthesized
MALPVTALLLPLALLLHAARPDIQMTQSPSSLSASVGDRVTITCRASQDISKYLNWYQQKPGKAPKLLIYHTSRLHSGVPSRFSGSGSGTDFTLTISSLQPEDFATYYCQQGNTLPYTFGQGTKVEIKGGGGSGGGGSGGGGSEVQLVESGGGLVQPGGSLRLSCAASGVSLPDYGVSWVRQAPGKGLEWVSVIWGSETTYYNSALKSRFTISRDNAKNSLYLQMNSLRAEDTAVYYCAKHYYYGGSYAMDYWGQGTLVTVSSTTTPAPRPPTPAPTIASQPLSLRPEACRPAAGGAVHTRGLDFACDIYIWAPLAGTCGVLLLSLVITLYCKRGRKKLLYIFKQPFMRPVQTTQEEDGCSCRFPEEEEGGCELRVKFSRSADAPAYQQGQNQLYNELNLGRREEYDVLDKRRGRDPEMGGKPRRKNPQEGLYNELQKDKMAEAYSEIGMKGERRRGKGHDGLYQGLSTATKDTYDALHMQALPPR

SEQ ID NO: 217 - DNA, 3524 bp, Artificial Sequence
  Synthesized
atggccttaccagtgaccgccttgctcctgccgctggccttgctgctccacgccgccaggccggatattgtgatgacccagtccccgtcctccctgaccgtgaccgcgggcgaaaaagtgaccatgatttgcaaatcctcccagtccctgctgaattccggcgatcagaaaaattatctgacctggtatcagcagaaaccgggccagccgccgaaactgctgattttttgggcgtccacccgtgaatccggcgtgccggatcgttttaccggctccggctccggcaccgattttaccctgaccatttcctccgtgcaggcggaagatctggcggtgtattattgccagaatgattattcctatccgctgacctttggcgcgggcaccaaactggaactgaaaggcggcggcggctccggcggcggcggctccggcggcggcggctcccaggtgcagctgcagcagtccgatgcggaactggtgaaaccgggctcctccgtgaaaatttcctgcaaagcgtccggctatacctttaccgatcatgcgattcattgggtgaaacagaaaccggaacagggcctggaatggattggccatttttccccgggcaataccgatattaaatataatgataaatttaaaggcaaagcgaccctgaccgtggatcgttcctcctccaccgcgtatatgcagctgaattccctgacctccgaagattccgcggtgtatttttgcaaaacctccacctttttttttgattattggggccagggcaccaccctgaccgtgtcctccaccacgacgccagcgccgcgaccaccaacaccggcgcccaccatcgcgtcgcagcccctgtccctgcgcccagaggcgtgccggccagcggcggggggcgcagtgcacacgagggggctggacttcgcctgtgatatctacatctgggcgcccttggccgggacttgtggggtccttctcctgtcactggttatcaccaaacggggcagaaagaaactcctgtatatattcaaacaaccatttatgagaccagtacaaactactcaagaggaagatggctgtagctgccgatttccagaagaagaagaaggaggatgtgaactgagagtgaagttcagcaggagcgcagacgcccccgcgtacaagcagggccagaaccagctctataacgagctcaatctaggacgaagagaggagtacgatgttttggacaagaggcgtggccgggaccctgagatggggggaaagccgagaaggaagaaccctcaggaaggcctgtacaatgaactgcagaaagataagatggcggaggcctacagtgagattgggatgaaaggcgagcgccggaggggcaaggggcacgatggcctttaccagggtctcagtacagccaccaaggacacctacgacgcccttcacatgcaggccctgccccctcgctaatctagaggcgcgcccctctccctcccccccccctaacgttactggccgaagccgcttggaataaggccggtgtgcgtttgtctatatgttattttccaccatattgccgtcttttggcaatgtgagggcccggaaacctggccctgtcttcttgacgagcattcctaggggtctttcccctctcgccaaaggaatgcaaggtctgttgaatgtcgtgaaggaagcagttcctctggaagcttcttgaagacaaacaacgtctgtagcgaccctttgcaggcagcggaaccccccacctggcgacaggtgcctctgcggccaaaagccacgtgtataagatacacctgcaaaggcggcacaaccccagtgccacgttgtgagttggatagttgtggaaagagtcaaatggctctcctcaagcgtattcaacaaggggctgaaggatgcccagaaggtaccccattgtatgggatctgatctggggcctcggtacacatgctttacatgtgtttagtcgaggttaaaaaaacgtctaggccccccgaaccacggggacgtggttttcctttgaaaaacacgatgataatatggccacaacccatatgatggccttaccagtgaccgccttgctcctgccgctggccttgctgctccacgccgccaggccggatatccagatgacccagagcccgagcagcctgagcgcgagcgtgggtgatcgcgtgaccattacctgcagggcaagtcaggacattagtaaatatttaaattggtatcagcagaaaccgggtaaagcgccgaaactgttaatttatcatacatcaagattacactcaggcgtgccgtcgcgttttagcggctcgggttcgggcaccgattttaccctgaccatctcgagcttgcagccggaggacttcgccacctactattgccaacagggtaatacgcttccgtacacgttcggtcagggcaccaaagtggagatcaaaggtggcggtggctcgggcggtggtgggtcgggtggcggcggatctgaggtgcagctggtggagtctgggggaggcttggtacagcctggggggtccctgagactctcctgtgcagcctctggagtgtccctgcctgattatggcgtgtcctgggtccgccaggctccagggaaggggctggagtgggtttcagtgatctggggcagcgagacaacctactacaacagcgccctgaagtcccgattcaccatctccagagacaatgccaagaactcactgtatctgcaaatgaacagcctgagagccgaggacacggctgtgtattactgtgcgaagcactactactacggcggcagctacgctatggactactggggccaaggaaccctggtcaccgtgtcctcaaccacgacgccagcgccgcgaccaccaacaccggcgcccaccatcgcgtcgcagcccctgtccctgcgcccagaggcgtgccggccagcggcggggggcgcagtgcacacgagggggctggacttcgcctgtgatatctacatctgggcgcccttggccgggacttgtggggtccttctcctgtcactggttatcaccctttactgcaaacggggcagaaagaaactcctgtatatattcaaacaaccatttatgagaccagtacaaactactcaagaggaagatggctgtagctgccgatttccagaagaagaagaaggaggatgtgaactgagagtgaagttcagcaggagcgcagacgcccccgcgtacaagcagggccagaaccagctctataacgagctcaatctaggacgaagagaggagtacgatgttttggacaagaggcgtggccgggaccctgagatggggggaaagccgagaaggaagaaccctcaggaaggcctgtacaatgaactgcagaaagataagatggcggaggcctacagtgagattgggatgaaaggcgagcgccggaggggcaaggggcacgatggcctttaccagggtctcagtacagccaccaaggacacctacgacgcccttcacatgcaggccctgccccctcgctaa

SEQ ID NO: 218 - DNA, 3524 bp, Artificial Sequence
  Synthesized
atggccttaccagtgaccgccttgctcctgccgctggccttgctgctccacgccgccaggccggatattgtgatgacccagtccccgtcctccctgaccgtgaccgcgggcgaaaaagtgaccatgatttgcaaatcctcccagtccctgctgaattccggcgatcagaaaaattatctgacctggtatcagcagaaaccgggccagccgccgaaactgctgattttttgggcgtccacccgtgaatccggcgtgccggatcgttttaccggctccggctccggcaccgattttaccctgaccatttcctccgtgcaggcggaagatctggcggtgtattattgccagaatgattattcctatccgctgacctttggcgcgggcaccaaactggaactgaaaggcggcggcggctccggcggcggcggctccggcggcggcggctcccaggtgcagctgcagcagtccgatgcggaactggtgaaaccgggctcctccgtgaaaatttcctgcaaagcgtccggctatacctttaccgatcatgcgattcattgggtgaaacagaaaccggaacagggcctggaatggattggccatttttccccgggcaataccgatattaaatataatgataaatttaaaggcaaagcgaccctgaccgtggatcgttcctcctccaccgcgtatatgcagctgaattccctgacctccgaagattccgcggtgtatttttgcaaaacctccacctttttttttgattattggggccagggcaccaccctgaccgtgtcctccaccacgacgccagcgccgcgaccaccaacaccggcgcccaccatcgcgtcgcagcccctgtccctgcgcccagaggcgtgccggccagcggcggggggcgcagtgcacacgagggggctggacttcgcctgtgatatctacatctgggcgcccttggccgggacttgtggggtccttctcctgtcactggttatcaccctttactgcaaacggggcagaaagaaactcctgtatatattcaaacaaccatttatgagaccagtacaaactactcaagaggaagatggctgtagctgccgatttccagaagaagaagaaggaggatgtgaactgagagtgaagttcagcaggagcgcagacgcccccgcgtacaagcagggccagaaccagctctataacgagctcaatctaggacgaagagaggagtacgatgttttggacaagaggcgtggccgggaccctgagatggggggaaagccgagaaggaagaaccctcaggaaggcctgtacaatgaactgcagaaagataagatggcggaggcctacagtgagattgggatgaaaggcgagcgccggaggggcaaggggcacgatggcctttaccagggtctcagtacagccaccaaggacacctacgacgcccttcacatgcaggccctgccccctcgctaatctagaggcgcgcccctctccctcccccccccctaacgttactggccgaagccgcttggaataaggccggtgtgcgtttgtctatatgttattttccaccatattgccgtcttttggcaatgtgagggcccggaaacctggccctgtcttcttgacgagcattcctaggggtctttcccctctcgccaaaggaatgcaaggtctgttgaatgtcgtgaaggaagcagttcctctggaagcttcttgaagacaaacaacgtctgtagcgaccctttgcaggcagcggaaccccccacctggcgacaggtgcctctgcggccaaaagccacgtgtataagatacacctgcaaaggcggcacaaccccagtgccacgttgtgagttggatagttgtggaaagagtcaaatggctctcctcaagcgtattcaacaaggggctgaaggatgcccagaaggtaccccattgtatgggatctgatctggggcctcggtacacatgctttacatgtgtttagtcgaggttaaaaaaacgtctaggccccccgaaccacggggacgtggttttcctttgaaaaacacgatgataatatggccacaacccatatgatggccttaccagtgaccgccttgctcctgccgctggccttgctgctccacgccgccaggccggatatccagatgacccagagcccgagcagcctgagcgcgagcgtgggtgatcgcgtgaccattacctgcagggcaagtcaggacattagtaaatatttaaattggtatcagcagaaaccgggtaaagcgccgaaactgttaatttatcatacatcaagattacactcaggcgtgccgtcgcgttttagcggctcgggttcgggcaccgattttaccctgaccatctcgagcttgcagccggaggacttcgccacctactattgccaacagggtaatacgcttccgtacacgttcggtcagggcaccaaagtggagatcaaaggtggcggtggctcgggcggtggtgggtcgggtggcggcggatctgaggtgcagctggtggagtctgggggaggcttggtacagcctggggggtccctgagactctcctgtgcagcctctggagtgtccctgcctgattatggcgtgtcctgggtccgccaggctccagggaaggggctggagtgggtttcagtgatctggggcagcgagacaacctactacaacagcgccctgaagtcccgattcaccatctccagagacaatgccaagaactcactgtatctgcaaatgaacagcctgagagccgaggacacggctgtgtattactgtgcgaagcactactactacggcggcagctacgctatggactactggggccaaggaaccctggtcaccgtgtcctcaaccacgacgccagcgccgcgaccaccaacaccggcgcccaccatcgcgtcgcagcccctgtccctgcgcccagaggcgtgccggccagcggcggggggcgcagtgcacacgagggggctggacttcgcctgtgatatctacatctgggcgcccttggccgggacttgtggggtccttctcctgtcactggttatcaccaaacggggcagaaagaaactcctgtatatattcaaacaaccatttatgagaccagtacaaactactcaagaggaagatggctgtagctgccgatttccagaagaagaagaaggaggatgtgaactgagagtgaagttcagcaggagcgcagacgcccccgcgtacaagcagggccagaaccagctctataacgagctcaatctaggacgaagagaggagtacgatgttttggacaagaggcgtggccgggaccctgagatggggggaaagccgagaaggaagaaccctcaggaaggcctgtacaatgaactgcagaaagataagatggcggaggcctacagtgagattgggatgaaaggcgagcgccggaggggcaaggggcacgatggcctttaccagggtctcagtacagccaccaaggacacctacgacgcccttcacatgcaggccctgccccctcgctaa

SEQ ID NO: 219 - protein, 483 aa, Artificial Sequence
  Synthesized
MALPVTALLLPLALLLHAARPDIQMTQSPSSLSASVGDRVTITCRASQDISKYLNWYQQKPGKAPKLLIYHTSRLHSGVPSRFSGSGSGTDFTLTISSLQPEDFATYYCQQGNTLPYTFGQGTKVEIKGGGGSGGGGSGGGGSEVQLVESGGGLVQPGGSLRLSCAASGVSLPDYGVSWVRQAPGKGLEWVSVIWGSETTYYNSALKSRFTISRDNAKNSLYLQMNSLRAEDTAVYYCAKHYYYGGSYAMDYWGQGTLVTVSSTTTPAPRPPTPAPTIASQPLSLRPEACRPAAGGAVHTRGLDFACDIYIWAPLAGTCGVLLLSLVITKRGRKKLLYIFKQPFMRPVQTTQEEDGCSCRFPEEEEGGCELRVKFSRSADAPAYQQGQNQLYNELNLGRREEYDVLDKRRGRDPEMGGKPRRKNPQEGLYNELQKDKMAEAYSEIGMKGERRRGKGHDGLYQGLSTATKDTYDALHMQALPPR

SEQ ID NO: 220 - DNA, 3515 bp, Artificial Sequence
  Synthesized
atggccttaccagtgaccgccttgctcctgccgctggccttgctgctccacgccgccaggccggatattgtgatgacccagtccccgtcctccctgaccgtgaccgcgggcgaaaaagtgaccatgatttgcaaatcctcccagtccctgctgaattccggcgatcagaaaaattatctgacctggtatcagcagaaaccgggccagccgccgaaactgctgattttttgggcgtccacccgtgaatccggcgtgccggatcgttttaccggctccggctccggcaccgattttaccctgaccatttcctccgtgcaggcggaagatctggcggtgtattattgccagaatgattattcctatccgctgacctttggcgcgggcaccaaactggaactgaaaggcggcggcggctccggcggcggcggctccggcggcggcggctcccaggtgcagctgcagcagtccgatgcggaactggtgaaaccgggctcctccgtgaaaatttcctgcaaagcgtccggctatacctttaccgatcatgcgattcattgggtgaaacagaaaccggaacagggcctggaatggattggccatttttccccgggcaataccgatattaaatataatgataaatttaaaggcaaagcgaccctgaccgtggatcgttcctcctccaccgcgtatatgcagctgaattccctgacctccgaagattccgcggtgtatttttgcaaaacctccacctttttttttgattattggggccagggcaccaccctgaccgtgtcctccaccacgacgccagcgccgcgaccaccaacaccggcgcccaccatcgcgtcgcagcccctgtccctgcgcccagaggcgtgccggccagcggcggggggcgcagtgcacacgagggggctggacttcgcctgtgatatctacatctgggcgcccttggccgggacttgtggggtccttctcctgtcactggttatcaccaaacggggcagaaagaaactcctgtatatattcaaacaaccatttatgagaccagtacaaactactcaagaggaagatggctgtagctgccgatttccagaagaagaagaaggaggatgtgaactgagagtgaagttcagcaggagcgcagacgcccccgcgtacaagcagggccagaaccagctctataacgagctcaatctaggacgaagagaggagtacgatgttttggacaagaggcgtggccgggaccctgagatggggggaaagccgagaaggaagaaccctcaggaaggcctgtacaatgaactgcagaaagataagatggcggaggcctacagtgagattgggatgaaaggcgagcgccggaggggcaaggggcacgatggcctttaccagggtctcagtacagccaccaaggacacctacgacgcccttcacatgcaggccctgccccctcgctaatctagaggcgcgcccctctccctcccccccccctaacgttactggccgaagccgcttggaataaggccggtgtgcgtttgtctatatgttattttccaccatattgccgtcttttggcaatgtgagggcccggaaacctggccctgtcttcttgacgagcattcctaggggtctttcccctctcgccaaaggaatgcaaggtctgttgaatgtcgtgaaggaagcagttcctctggaagcttcttgaagacaaacaacgtctgtagcgaccctttgcaggcagcggaaccccccacctggcgacaggtgcctctgcggccaaaagccacgtgtataagatacacctgcaaaggcggcacaaccccagtgccacgttgtgagttggatagttgtggaaagagtcaaatggctctcctcaagcgtattcaacaaggggctgaaggatgcccagaaggtaccccattgtatgggatctgatctggggcctcggtacacatgctttacatgtgtttagtcgaggttaaaaaaacgtctaggccccccgaaccacggggacgtggttttcctttgaaaaacacgatgataatatggccacaacccatatgatggccttaccagtgaccgccttgctcctgccgctggccttgctgctccacgccgccaggccggatatccagatgacccagagcccgagcagcctgagcgcgagcgtgggtgatcgcgtgaccattacctgcagggcaagtcaggacattagtaaatatttaaattggtatcagcagaaaccgggtaaagcgccgaaactgttaatttatcatacatcaagattacactcaggcgtgccgtcgcgttttagcggctcgggttcgggcaccgattttaccctgaccatctcgagcttgcagccggaggacttcgccacctactattgccaacagggtaatacgcttccgtacacgttcggtcagggcaccaaagtggagatcaaaggtggcggtggctcgggcggtggtgggtcgggtggcggcggatctgaggtgcagctggtggagtctgggggaggcttggtacagcctggggggtccctgagactctcctgtgcagcctctggagtgtccctgcctgattatggcgtgtcctgggtccgccaggctccagggaaggggctggagtgggtttcagtgatctggggcagcgagacaacctactacaacagcgccctgaagtcccgattcaccatctccagagacaatgccaagaactcactgtatctgcaaatgaacagcctgagagccgaggacacggctgtgtattactgtgcgaagcactactactacggcggcagctacgctatggactactggggccaaggaaccctggtcaccgtgtcctcaaccacgacgccagcgccgcgaccaccaacaccggcgcccaccatcgcgtcgcagcccctgtccctgcgcccagaggcgtgccggccagcggcggggggcgcagtgcacacgagggggctggacttcgcctgtgatatctacatctgggcgcccttggccgggacttgtggggtccttctcctgtcactggttatcaccaaacggggcagaaagaaactcctgtatatattcaaacaaccatttatgagaccagtacaaactactcaagaggaagatggctgtagctgccgatttccagaagaagaagaaggaggatgtgaactgagagtgaagttcagcaggagcgcagacgcccccgcgtacaagcagggccagaaccagctctataacgagctcaatctaggacgaagagaggagtacgatgttttggacaagaggcgtggccgggaccctgagatggggggaaagccgagaaggaagaaccctcaggaaggcctgtacaatgaactgcagaaagataagatggcggaggcctacagtgagattgggatgaaaggcgagcgccggaggggcaaggggcacgatggcctttaccagggtctcagtacagccaccaaggacacctacgacgcccttcacatgcaggccctgccccctcgctaa

SEQ ID NO: 221 - protein, 3533 aa, Artificial Sequence
  Synthesized
ATGGCCTTACCAGTGACCGCCTTGCTCCTGCCGCTGGCCTTGCTGCTCCACGCCGCCAGGCCGGACATCGTGATGACCCAGTCCCCCTCCAGCCTGACAGTGACAGCCGGCGAGAAGGTGACAATGATCTGTAAGTCCAGCCAGAGCCTGCTGAACAGCGGCGACCAGAAGAACTACCTGACCTGGTACCAGCAGAAGCCTGGCCAGCCCCCCAAGCTGCTGATCTTCTGGGCCAGCACAAGGGAGAGCGGCGTGCCCGACAGATTCACAGGCAGCGGCAGCGGCACCGACTTCACACTGACCATTTCCTCCGTGCAGGCCGAGGACCTCGCCGTGTACTACTGCCAGAACGACTACTCCTACCCCCTGACATTCGGCGCCGGCACCAAACTGGAGCTGAAGGGTGGCGGTGGCTCGGGCGGTGGTGGGTCGGGTGGCGGCGGATCTCAGGTGCAGCTCCAGCAGTCCGATGCCGAGCTGGTGAAGCCCGGAAGCAGCGTCAAGATCAGCTGTAAGGCCTCCGGCTACACCTTCACAGACCACGCCATCCACTGGGTGAAGCAGAAGCCCGAGCAGGGCCTGGAGTGGATCGGCCACTTTAGCCCCGGAAACACCGACATCAAGTACAACGACAAGTTCAAGGGCAAGGCCACCCTGACCGTGGACAGGAGCAGCAGCACCGCCTACATGCAGCTGAACAGCCTGACAAGCGAGGACAGCGCCGTGTACTTCTGCAAGACCTCCACCTTCTTCTTCGACTACTGGGGCCAGGGAACCACCCTGACAGTGTCCAGCACCACGACGCCAGCGCCGCGACCACCAACACCGGCGCCCACCATCGCGTCGCAGCCCCTGTCCCTGCGCCCAGAGGCGTGCCGGCCAGCGGCGGGGGGCGCAGTGCACACGAGGGGGCTGGACTTCGCCTGTGATATCTACATCTGGGCGCCCTTGGCCGGGACTTGTGGGGTCCTTCTCCTGTCACTGGTTATCACCCTTTACTGCAAACGGGGCAGAAAGAAACTCCTGTATATATTCAAACAACCATTTATGAGACCAGTACAAACTACTCAAGAGGAAGATGGCTGTAGCTGCCGATTTCCAGAAGAAGAAGAAGGAGGATGTGAACTGAGAGTGAAGTTCAGCAGGAGCGCAGACGCCCCCGCGTACAAGCAGGGCCAGAACCAGCTCTATAACGAGCTCAATCTAGGACGAAGAGAGGAGTACGATGTTTTGGACAAGAGGCGTGGCCGGGACCCTGAGATGGGGGGAAAGCCGAGAAGGAAGAACCCTCAGGAAGGCCTGTACAATGAACTGCAGAAAGATAAGATGGCGGAGGCCTACAGTGAGATTGGGATGAAAGGCGAGCGCCGGAGGGGCAAGGGGCACGATGGCCTTTACCAGGGTCTCAGTACAGCCACCAAGGACACCTACGACGCCCTTCACATGCAGGCCCTGCCCCCTCGCTAATCTAGAGGCGCGCCCCTCTCCCTCCCCCCCCCCTAACGTTACTGGCCGAAGCCGCTTGGAATAAGGCCGGTGTGCGTTTGTCTATATGTTATTTTCCACCATATTGCCGTCTTTTGGCAATGTGAGGGCCCGGAAACCTGGCCCTGTCTTCTTGACGAGCATTCCTAGGGGTCTTTCCCCTCTCGCCAAAGGAATGCAAGGTCTGTTGAATGTCGTGAAGGAAGCAGTTCCTCTGGAAGCTTCTTGAAGACAAACAACGTCTGTAGCGACCCTTTGCAGGCAGCGGAACCCCCCACCTGGCGACAGGTGCCTCTGCGGCCAAAAGCCACGTGTATAAGATACACCTGCAAAGGCGGCACAACCCCAGTGCCACGTTGTGAGTTGGATAGTTGTGGAAAGAGTCAAATGGCTCTCCTCAAGCGTATTCAACAAGGGGCTGAAGGATGCCCAGAAGGTACCCCATTGTATGGGATCTGATCTGGGGCCTCGGTACACATGCTTTACATGTGTTTAGTCGAGGTTAAAAAAACGTCTAGGCCCCCCGAACCACGGGGACGTGGTTTTCCTTTGAAAAACACGATGATAATATGGCCACAACCCATATGATGGCCTTACCAGTGACCGCCTTGCTCCTGCCGCTGGCCTTGCTGCTCCACGCCGCCAGGCCGGATATCCAGATGACCCAGAGCCCGAGCAGCCTGAGCGCGAGCGTGGGTGATCGCGTGACCATTACCTGCAGGGCAAGTCAGGACATTAGTAAATATTTAAATTGGTATCAGCAGAAACCGGGTAAAGCGCCGAAACTGTTAATTTATCATACATCAAGATTACACTCAGGCGTGCCGTCGCGTTTTAGCGGCTCGGGTTCGGGCACCGATTTTACCCTGACCATCTCGAGCTTGCAGCCGGAGGACTTCGCCACCTACTATTGCCAACAGGGTAATACGCTTCCGTACACGTTCGGTCAGGGCACCAAAGTGGAGATCAAAGGTGGCGGTGGCTCGGGCGGTGGTGGGTCGGGTGGCGGCGGATCTGAGGTGCAGCTGGTGGAGTCTGGGGGAGGCTTGGTACAGCCTGGGGGGTCCCTGAGACTCTCCTGTGCAGCCTCTGGAGTGTCCCTGCCTGATTATGGCGTGTCCTGGGTCCGCCAGGCTCCAGGGAAGGGGCTGGAGTGGGTTTCAGTGATCTGGGGCAGCGAGACAACCTACTACAACAGCGCCCTGAAGTCCCGATTCACCATCTCCAGAGACAATGCCAAGAACTCACTGTATCTGCAAATGAACAGCCTGAGAGCCGAGGACACGGCTGTGTATTACTGTGCGAAGCACTACTACTACGGCGGCAGCTACGCTATGGACTACTGGGGCCAAGGAACCCTGGTCACCGTGTCCTCAACCACGACGCCAGCGCCGCGACCACCAACACCGGCGCCCACCATCGCGTCGCAGCCCCTGTCCCTGCGCCCAGAGGCGTGCCGGCCAGCGGCGGGGGGCGCAGTGCACACGAGGGGGCTGGACTTCGCCTGTGATATCTACATCTGGGCGCCCTTGGCCGGGACTTGTGGGGTCCTTCTCCTGTCACTGGTTATCACCCTTTACTGCAAACGGGGCAGAAAGAAACTCCTGTATATATTCAAACAACCATTTATGAGACCAGTACAAACTACTCAAGAGGAAGATGGCTGTAGCTGCCGATTTCCAGAAGAAGAAGAAGGAGGATGTGAACTGAGAGTGAAGTTCAGCAGGAGCGCAGACGCCCCCGCGTACAAGCAGGGCCAGAACCAGCTCTATAACGAGCTCAATCTAGGACGAAGAGAGGAGTACGATGTTTTGGACAAGAGGCGTGGCCGGGACCCTGAGATGGGGGGAAAGCCGAGAAGGAAGAACCCTCAGGAAGGCCTGTACAATGAACTGCAGAAAGATAAGATGGCGGAGGCCTACAGTGAGATTGGGATGAAAGGCGAGCGCCGGAGGGGCAAGGGGCACGATGGCCTTTACCAGGGTCTCAGTACAGCCACCAAGGACACCTACGACGCCCTTCACATGCAGGCCCTGCCCCCTCGCTAA

SEQ ID NO: 222 - DNA, 3524 bp, Artificial Sequence
  Synthesized
atggccttaccagtgaccgccttgctcctgccgctggccttgctgctccacgccgccaggccggacatcgtgatgacccagtccccctccagcctgacagtgacagccggcgagaaggtgacaatgatctgtaagtccagccagagcctgctgaacagcggcgaccagaagaactacctgacctggtaccagcagaagcctggccagccccccaagctgctgatcttctgggccagcacaagggagagcggcgtgcccgacagattcacaggcagcggcagcggcaccgacttcacactgaccatttcctccgtgcaggccgaggacctcgccgtgtactactgccagaacgactactcctaccccctgacattcggcgccggcaccaaactggagctgaagggtggcggtggctcgggcggtggtgggtcgggtggcggcggatctcaggtgcagctccagcagtccgatgccgagctggtgaagcccggaagcagcgtcaagatcagctgtaaggcctccggctacaccttcacagaccacgccatccactgggtgaagcagaagcccgagcagggcctggagtggatcggccactttagccccggaaacaccgacatcaagtacaacgacaagttcaagggcaaggccaccctgaccgtggacaggagcagcagcaccgcctacatgcagctgaacagcctgacaagcgaggacagcgccgtgtacttctgcaagacctccaccttcttcttcgactactggggccagggaaccaccctgacagtgtccagcaccacgacgccagcgccgcgaccaccaacaccggcgcccaccatcgcgtcgcagcccctgtccctgcgcccagaggcgtgccggccagcggcggggggcgcagtgcacacgagggggctggacttcgcctgtgatatctacatctgggcgcccttggccgggacttgtggggtccttctcctgtcactggttatcaccaaacggggcagaaagaaactcctgtatatattcaaacaaccatttatgagaccagtacaaactactcaagaggaagatggctgtagctgccgatttccagaagaagaagaaggaggatgtgaactgagagtgaagttcagcaggagcgcagacgcccccgcgtacaagcagggccagaaccagctctataacgagctcaatctaggacgaagagaggagtacgatgttttggacaagaggcgtggccgggaccctgagatggggggaaagccgagaaggaagaaccctcaggaaggcctgtacaatgaactgcagaaagataagatggcggaggcctacagtgagattgggatgaaaggcgagcgccggaggggcaaggggcacgatggcctttaccagggtctcagtacagccaccaaggacacctacgacgcccttcacatgcaggccctgccccctcgctaatctagaggcgcgcccctctccctcccccccccctaacgttactggccgaagccgcttggaataaggccggtgtgcgtttgtctatatgttattttccaccatattgccgtcttttggcaatgtgagggcccggaaacctggccctgtcttcttgacgagcattcctaggggtctttcccctctcgccaaaggaatgcaaggtctgttgaatgtcgtgaaggaagcagttcctctggaagcttcttgaagacaaacaacgtctgtagcgaccctttgcaggcagcggaaccccccacctggcgacaggtgcctctgcggccaaaagccacgtgtataagatacacctgcaaaggcggcacaaccccagtgccacgttgtgagttggatagttgtggaaagagtcaaatggctctcctcaagcgtattcaacaaggggctgaaggatgcccagaaggtaccccattgtatgggatctgatctggggcctcggtacacatgctttacatgtgtttagtcgaggttaaaaaaacgtctaggccccccgaaccacggggacgtggttttcctttgaaaaacacgatgataatatggccacaacccatatgatggccttaccagtgaccgccttgctcctgccgctggccttgctgctccacgccgccaggccggatatccagatgacccagagcccgagcagcctgagcgcgagcgtgggtgatcgcgtgaccattacctgcagggcaagtcaggacattagtaaatatttaaattggtatcagcagaaaccgggtaaagcgccgaaactgttaatttatcatacatcaagattacactcaggcgtgccgtcgcgttttagcggctcgggttcgggcaccgattttaccctgaccatctcgagcttgcagccggaggacttcgccacctactattgccaacagggtaatacgcttccgtacacgttcggtcagggcaccaaagtggagatcaaaggtggcggtggctcgggcggtggtgggtcgggtggcggcggatctgaggtgcagctggtggagtctgggggaggcttggtacagcctggggggtccctgagactctcctgtgcagcctctggagtgtccctgcctgattatggcgtgtcctgggtccgccaggctccagggaaggggctggagtgggtttcagtgatctggggcagcgagacaacctactacaacagcgccctgaagtcccgattcaccatctccagagacaatgccaagaactcactgtatctgcaaatgaacagcctgagagccgaggacacggctgtgtattactgtgcgaagcactactactacggcggcagctacgctatggactactggggccaaggaaccctggtcaccgtgtcctcaaccacgacgccagcgccgcgaccaccaacaccggcgcccaccatcgcgtcgcagcccctgtccctgcgcccagaggcgtgccggccagcggcggggggcgcagtgcacacgagggggctggacttcgcctgtgatatctacatctgggcgcccttggccgggacttgtggggtccttctcctgtcactggttatcaccctttactgcaaacggggcagaaagaaactcctgtatatattcaaacaaccatttatgagaccagtacaaactactcaagaggaagatggctgtagctgccgatttccagaagaagaagaaggaggatgtgaactgagagtgaagttcagcaggagcgcagacgcccccgcgtacaagcagggccagaaccagctctataacgagctcaatctaggacgaagagaggagtacgatgttttggacaagaggcgtggccgggaccctgagatggggggaaagccgagaaggaagaaccctcaggaaggcctgtacaatgaactgcagaaagataagatggcggaggcctacagtgagattgggatgaaaggcgagcgccggaggggcaaggggcacgatggcctttaccagggtctcagtacagccaccaaggacacctacgacgcccttcacatgcaggccctgccccctcgctaa

SEQ ID NO: 223 - DNA, 3524 bp, Artificial Sequence
  Synthesized
atggccttaccagtgaccgccttgctcctgccgctggccttgctgctccacgccgccaggccggacatcgtgatgacccagtccccctccagcctgacagtgacagccggcgagaaggtgacaatgatctgtaagtccagccagagcctgctgaacagcggcgaccagaagaactacctgacctggtaccagcagaagcctggccagccccccaagctgctgatcttctgggccagcacaagggagagcggcgtgcccgacagattcacaggcagcggcagcggcaccgacttcacactgaccatttcctccgtgcaggccgaggacctcgccgtgtactactgccagaacgactactcctaccccctgacattcggcgccggcaccaaactggagctgaagggtggcggtggctcgggcggtggtgggtcgggtggcggcggatctcaggtgcagctccagcagtccgatgccgagctggtgaagcccggaagcagcgtcaagatcagctgtaaggcctccggctacaccttcacagaccacgccatccactgggtgaagcagaagcccgagcagggcctggagtggatcggccactttagccccggaaacaccgacatcaagtacaacgacaagttcaagggcaaggccaccctgaccgtggacaggagcagcagcaccgcctacatgcagctgaacagcctgacaagcgaggacagcgccgtgtacttctgcaagacctccaccttcttcttcgactactggggccagggaaccaccctgacagtgtccagcaccacgacgccagcgccgcgaccaccaacaccggcgcccaccatcgcgtcgcagcccctgtccctgcgcccagaggcgtgccggccagcggcggggggcgcagtgcacacgagggggctggacttcgcctgtgatatctacatctgggcgcccttggccgggacttgtggggtccttctcctgtcactggttatcaccctttactgcaaacggggcagaaagaaactcctgtatatattcaaacaaccatttatgagaccagtacaaactactcaagaggaagatggctgtagctgccgatttccagaagaagaagaaggaggatgtgaactgagagtgaagttcagcaggagcgcagacgcccccgcgtacaagcagggccagaaccagctctataacgagctcaatctaggacgaagagaggagtacgatgttttggacaagaggcgtggccgggaccctgagatggggggaaagccgagaaggaagaaccctcaggaaggcctgtacaatgaactgcagaaagataagatggcggaggcctacagtgagattgggatgaaaggcgagcgccggaggggcaaggggcacgatggcctttaccagggtctcagtacagccaccaaggacacctacgacgcccttcacatgcaggccctgccccctcgctaatctagaggcgcgcccctctccctcccccccccctaacgttactggccgaagccgcttggaataaggccggtgtgcgtttgtctatatgttattttccaccatattgccgtcttttggcaatgtgagggcccggaaacctggccctgtcttcttgacgagcattcctaggggtctttcccctctcgccaaaggaatgcaaggtctgttgaatgtcgtgaaggaagcagttcctctggaagcttcttgaagacaaacaacgtctgtagcgaccctttgcaggcagcggaaccccccacctggcgacaggtgcctctgcggccaaaagccacgtgtataagatacacctgcaaaggcggcacaaccccagtgccacgttgtgagttggatagttgtggaaagagtcaaatggctctcctcaagcgtattcaacaaggggctgaaggatgcccagaaggtaccccattgtatgggatctgatctggggcctcggtacacatgctttacatgtgtttagtcgaggttaaaaaaacgtctaggccccccgaaccacggggacgtggttttcctttgaaaaacacgatgataatatggccacaacccatatgatggccttaccagtgaccgccttgctcctgccgctggccttgctgctccacgccgccaggccggatatccagatgacccagagcccgagcagcctgagcgcgagcgtgggtgatcgcgtgaccattacctgcagggcaagtcaggacattagtaaatatttaaattggtatcagcagaaaccgggtaaagcgccgaaactgttaatttatcatacatcaagattacactcaggcgtgccgtcgcgttttagcggctcgggttcgggcaccgattttaccctgaccatctcgagcttgcagccggaggacttcgccacctactattgccaacagggtaatacgcttccgtacacgttcggtcagggcaccaaagtggagatcaaaggtggcggtggctcgggcggtggtgggtcgggtggcggcggatctgaggtgcagctggtggagtctgggggaggcttggtacagcctggggggtccctgagactctcctgtgcagcctctggagtgtccctgcctgattatggcgtgtcctgggtccgccaggctccagggaaggggctggagtgggtttcagtgatctggggcagcgagacaacctactacaacagcgccctgaagtcccgattcaccatctccagagacaatgccaagaactcactgtatctgcaaatgaacagcctgagagccgaggacacggctgtgtattactgtgcgaagcactactactacggcggcagctacgctatggactactggggccaaggaaccctggtcaccgtgtcctcaaccacgacgccagcgccgcgaccaccaacaccggcgcccaccatcgcgtcgcagcccctgtccctgcgcccagaggcgtgccggccagcggcggggggcgcagtgcacacgagggggctggacttcgcctgtgatatctacatctgggcgcccttggccgggacttgtggggtccttctcctgtcactggttatcaccaaacggggcagaaagaaactcctgtatatattcaaacaaccatttatgagaccagtacaaactactcaagaggaagatggctgtagctgccgatttccagaagaagaagaaggaggatgtgaactgagagtgaagttcagcaggagcgcagacgcccccgcgtacaagcagggccagaaccagctctataacgagctcaatctaggacgaagagaggagtacgatgttttggacaagaggcgtggccgggaccctgagatggggggaaagccgagaaggaagaaccctcaggaaggcctgtacaatgaactgcagaaagataagatggcggaggcctacagtgagattgggatgaaaggcgagcgccggaggggcaaggggcacgatggcctttaccagggtctcagtacagccaccaaggacacctacgacgcccttcacatgcaggccctgccccctcgctaa

SEQ ID NO: 224 - DNA, 3515 bp, Artificial Sequence
  Synthesized
atggccttaccagtgaccgccttgctcctgccgctggccttgctgctccacgccgccaggccggacatcgtgatgacccagtccccctccagcctgacagtgacagccggcgagaaggtgacaatgatctgtaagtccagccagagcctgctgaacagcggcgaccagaagaactacctgacctggtaccagcagaagcctggccagccccccaagctgctgatcttctgggccagcacaagggagagcggcgtgcccgacagattcacaggcagcggcagcggcaccgacttcacactgaccatttcctccgtgcaggccgaggacctcgccgtgtactactgccagaacgactactcctaccccctgacattcggcgccggcaccaaactggagctgaagggtggcggtggctcgggcggtggtgggtcgggtggcggcggatctcaggtgcagctccagcagtccgatgccgagctggtgaagcccggaagcagcgtcaagatcagctgtaaggcctccggctacaccttcacagaccacgccatccactgggtgaagcagaagcccgagcagggcctggagtggatcggccactttagccccggaaacaccgacatcaagtacaacgacaagttcaagggcaaggccaccctgaccgtggacaggagcagcagcaccgcctacatgcagctgaacagcctgacaagcgaggacagcgccgtgtacttctgcaagacctccaccttcttcttcgactactggggccagggaaccaccctgacagtgtccagcaccacgacgccagcgccgcgaccaccaacaccggcgcccaccatcgcgtcgcagcccctgtccctgcgcccagaggcgtgccggccagcggcggggggcgcagtgcacacgagggggctggacttcgcctgtgatatctacatctgggcgcccttggccgggacttgtggggtccttctcctgtcactggttatcaccaaacggggcagaaagaaactcctgtatatattcaaacaaccatttatgagaccagtacaaactactcaagaggaagatggctgtagctgccgatttccagaagaagaagaaggaggatgtgaactgagagtgaagttcagcaggagcgcagacgcccccgcgtacaagcagggccagaaccagctctataacgagctcaatctaggacgaagagaggagtacgatgttttggacaagaggcgtggccgggaccctgagatggggggaaagccgagaaggaagaaccctcaggaaggcctgtacaatgaactgcagaaagataagatggcggaggcctacagtgagattgggatgaaaggcgagcgccggaggggcaaggggcacgatggcctttaccagggtctcagtacagccaccaaggacacctacgacgcccttcacatgcaggccctgccccctcgctaatctagaggcgcgcccctctccctcccccccccctaacgttactggccgaagccgcttggaataaggccggtgtgcgtttgtctatatgttattttccaccatattgccgtcttttggcaatgtgagggcccggaaacctggccctgtcttcttgacgagcattcctaggggtctttcccctctcgccaaaggaatgcaaggtctgttgaatgtcgtgaaggaagcagttcctctggaagcttcttgaagacaaacaacgtctgtagcgaccctttgcaggcagcggaaccccccacctggcgacaggtgcctctgcggccaaaagccacgtgtataagatacacctgcaaaggcggcacaaccccagtgccacgttgtgagttggatagttgtggaaagagtcaaatggctctcctcaagcgtattcaacaaggggctgaaggatgcccagaaggtaccccattgtatgggatctgatctggggcctcggtacacatgctttacatgtgtttagtcgaggttaaaaaaacgtctaggccccccgaaccacggggacgtggttttcctttgaaaaacacgatgataatatggccacaacccatatgatggccttaccagtgaccgccttgctcctgccgctggccttgctgctccacgccgccaggccggatatccagatgacccagagcccgagcagcctgagcgcgagcgtgggtgatcgcgtgaccattacctgcagggcaagtcaggacattagtaaatatttaaattggtatcagcagaaaccgggtaaagcgccgaaactgttaatttatcatacatcaagattacactcaggcgtgccgtcgcgttttagcggctcgggttcgggcaccgattttaccctgaccatctcgagcttgcagccggaggacttcgccacctactattgccaacagggtaatacgcttccgtacacgttcggtcagggcaccaaagtggagatcaaaggtggcggtggctcgggcggtggtgggtcgggtggcggcggatctgaggtgcagctggtggagtctgggggaggcttggtacagcctggggggtccctgagactctcctgtgcagcctctggagtgtccctgcctgattatggcgtgtcctgggtccgccaggctccagggaaggggctggagtgggtttcagtgatctggggcagcgagacaacctactacaacagcgccctgaagtcccgattcaccatctccagagacaatgccaagaactcactgtatctgcaaatgaacagcctgagagccgaggacacggctgtgtattactgtgcgaagcactactactacggcggcagctacgctatggactactggggccaaggaaccctggtcaccgtgtcctcaaccacgacgccagcgccgcgaccaccaacaccggcgcccaccatcgcgtcgcagcccctgtccctgcgcccagaggcgtgccggccagcggcggggggcgcagtgcacacgagggggctggacttcgcctgtgatatctacatctgggcgcccttggccgggacttgtggggtccttctcctgtcactggttatcaccaaacggggcagaaagaaactcctgtatatattcaaacaaccatttatgagaccagtacaaactactcaagaggaagatggctgtagctgccgatttccagaagaagaagaaggaggatgtgaactgagagtgaagttcagcaggagcgcagacgcccccgcgtacaagcagggccagaaccagctctataacgagctcaatctaggacgaagagaggagtacgatgttttggacaagaggcgtggccgggaccctgagatggggggaaagccgagaaggaagaaccctcaggaaggcctgtacaatgaactgcagaaagataagatggcggaggcctacagtgagattgggatgaaaggcgagcgccggaggggcaaggggcacgatggcctttaccagggtctcagtacagccaccaaggacacctacgacgcccttcacatgcaggccctgccccctcgctaa

SEQ ID NO: 225 - DNA, 3545 bp, Artificial Sequence
  Synthesized
atggccttaccagtgaccgccttgctcctgccgctggccttgctgctccacgccgccaggccggatattgtgatgacccagtccccgtcctccctgaccgtgaccgcgggcgaaaaagtgaccatgatttgcaaatcctcccagtccctgctgaattccggcgatcagaaaaattatctgacctggtatcagcagaaaccgggccagccgccgaaactgctgattttttgggcgtccacccgtgaatccggcgtgccggatcgttttaccggctccggctccggcaccgattttaccctgaccatttcctccgtgcaggcggaagatctggcggtgtattattgccagaatgattattcctatccgctgacctttggcgcgggcaccaaactggaactgaaaggcggcggcggctccggcggcggcggctccggcggcggcggctcccaggtgcagctgcagcagtccgatgcggaactggtgaaaccgggctcctccgtgaaaatttcctgcaaagcgtccggctatacctttaccgatcatgcgattcattgggtgaaacagaaaccggaacagggcctggaatggattggccatttttccccgggcaataccgatattaaatataatgataaatttaaaggcaaagcgaccctgaccgtggatcgttcctcctccaccgcgtatatgcagctgaattccctgacctccgaagattccgcggtgtatttttgcaaaacctccacctttttttttgattattggggccagggcaccaccctgaccgtgtcctccaccacgacgccagcgccgcgaccaccaacaccggcgcccaccatcgcgtcgcagcccctgtccctgcgcccagaggcgtgccggccagcggcggggggcgcagtgcacacgagggggctggacttcgcctgtgatatctacatctgggcgcccttggccgggacttgtggggtccttctcctgtcactggttatcaccctttactgcaaacggggcagaaagaaactcctgtatatattcaaacaaccatttatgagaccagtacaaactactcaagaggaagatggctgtagctgccgatttccagaagaagaagaaggaggatgtgaactgagagtgaagttcagcaggagcgcagacgcccccgcgtacaagcagggccagaaccagctctataacgagctcaatctaggacgaagagaggagtacgatgttttggacaagaggcgtggccgggaccctgagatggggggaaagccgagaaggaagaaccctcaggaaggcctgtacaatgaactgcagaaagataagatggcggaggcctacagtgagattgggatgaaaggcgagcgccggaggggcaaggggcacgatggcctttaccagggtctcagtacagccaccaaggacacctacgacgcccttcacatgcaggccctgccccctcgctaatctagaggcgcgcccctctccctcccccccccctaacgttactggccgaagccgcttggaataaggccggtgtgcgtttgtctatatgttattttccaccatattgccgtcttttggcaatgtgagggcccggaaacctggccctgtcttcttgacgagcattcctaggggtctttcccctctcgccaaaggaatgcaaggtctgttgaatgtcgtgaaggaagcagttcctctggaagcttcttgaagacaaacaacgtctgtagcgaccctttgcaggcagcggaaccccccacctggcgacaggtgcctctgcggccaaaagccacgtgtataagatacacctgcaaaggcggcacaaccccagtgccacgttgtgagttggatagttgtggaaagagtcaaatggctctcctcaagcgtattcaacaaggggctgaaggatgcccagaaggtaccccattgtatgggatctgatctggggcctcggtacacatgctttacatgtgtttagtcgaggttaaaaaaacgtctaggccccccgaaccacggggacgtggttttcctttgaaaaacacgatgataatatggccacaacccatatgatggccttaccagtgaccgccttgctcctgccgctggccttgctgctccacgccgccaggccggatatccagatgacccagagcccaagctccctgtccgcctctgtgggcgacagggtgaccatcacatgccgcgccagccagacaatctggtcctacctgaactggtatcagcagagacccggcaaggcccctaatctgctgatctacgcagcatctagcctgcagtctggagtgccctcccggttctctggaagaggatccggaaccgacttcaccctgacaatctcctctctgcaggccgaggacttcgccacatactattgccagcagagctattccatccctcagacctttggccagggcacaaagctggagatcaagggcggcggcggctctggaggaggaggaagcggaggaggaggatcccaggtgcagctgcagcagagcggaccaggactggtgaagccctcccagaccctgtctctgacatgtgccatcagcggcgattccgtgagctccaacagcgccgcctggaattggatccggcagtctcccagcagaggactggagtggctgggaaggacctactatcgctccaagtggtacaacgattatgccgtgtctgtgaagagccggatcaccatcaaccctgacacatctaagaatcagttcagcctgcagctgaattccgtgaccccagaggacacagccgtgtactattgtgcaagggaggtgaccggcgacctggaggatgcctttgacatctggggccagggcaccatggtgacagtgtctagcaccacgacgccagcgccgcgaccaccaacaccggcgcccaccatcgcgtcgcagcccctgtccctgcgcccagaggcgtgccggccagcggcggggggcgcagtgcacacgagggggctggacttcgcctgtgatatctacatctgggcgcccttggccgggacttgtggggtccttctcctgtcactggttatcaccctttactgcaaacggggcagaaagaaactcctgtatatattcaaacaaccatttatgagaccagtacaaactactcaagaggaagatggctgtagctgccgatttccagaagaagaagaaggaggatgtgaactgagagtgaagttcagcaggagcgcagacgcccccgcgtacaagcagggccagaaccagctctataacgagctcaatctaggacgaagagaggagtacgatgttttggacaagaggcgtggccgggaccctgagatggggggaaagccgagaaggaagaaccctcaggaaggcctgtacaatgaactgcagaaagataagatggcggaggcctacagtgagattgggatgaaaggcgagcgccggaggggcaaggggcacgatggcctttaccagggtctcagtacagccaccaaggacacctacgacgcccttcacatgcaggccctgccccctcgctaa

SEQ ID NO: 226 - protein, 490 aa, Artificial Sequence
  Synthesized
MALPVTALLLPLALLLHAARPDIQMTQSPSSLSASVGDRVTITCRASQTIWSYLNWYQQRPGKAPNLLIYAASSLQSGVPSRFSGRGSGTDFTLTISSLQAEDFATYYCQQSYSIPQTFGQGTKLEIKGGGGSGGGGSGGGGSQVQLQQSGPGLVKPSQTLSLTCAISGDSVSSNSAAWNWIRQSPSRGLEWLGRTYYRSKWYNDYAVSVKSRITINPDTSKNQFSLQLNSVTPEDTAVYYCAREVTGDLEDAFDIWGQGTMVTVSSTTTPAPRPPTPAPTIASQPLSLRPEACRPAAGGAVHTRGLDFACDIYIWAPLAGTCGVLLLSLVITLYCKRGRKKLLYIFKQPFMRPVQTTQEEDGCSCRFPEEEEGGCELRVKFSRSADAPAYQQGQNQLYNELNLGRREEYDVLDKRRGRDPEMGGKPRRKNPQEGLYNELQKDKMAEAYSEIGMKGERRRGKGHDGLYQGLSTATKDTYDALHMQALPPR

SEQ ID NO: 227 - DNA, 3536 bp, Artificial Sequence
  Synthesized
atggccttaccagtgaccgccttgctcctgccgctggccttgctgctccacgccgccaggccggatattgtgatgacccagtccccgtcctccctgaccgtgaccgcgggcgaaaaagtgaccatgatttgcaaatcctcccagtccctgctgaattccggcgatcagaaaaattatctgacctggtatcagcagaaaccgggccagccgccgaaactgctgattttttgggcgtccacccgtgaatccggcgtgccggatcgttttaccggctccggctccggcaccgattttaccctgaccatttcctccgtgcaggcggaagatctggcggtgtattattgccagaatgattattcctatccgctgacctttggcgcgggcaccaaactggaactgaaaggcggcggcggctccggcggcggcggctccggcggcggcggctcccaggtgcagctgcagcagtccgatgcggaactggtgaaaccgggctcctccgtgaaaatttcctgcaaagcgtccggctatacctttaccgatcatgcgattcattgggtgaaacagaaaccggaacagggcctggaatggattggccatttttccccgggcaataccgatattaaatataatgataaatttaaaggcaaagcgaccctgaccgtggatcgttcctcctccaccgcgtatatgcagctgaattccctgacctccgaagattccgcggtgtatttttgcaaaacctccacctttttttttgattattggggccagggcaccaccctgaccgtgtcctccaccacgacgccagcgccgcgaccaccaacaccggcgcccaccatcgcgtcgcagcccctgtccctgcgcccagaggcgtgccggccagcggcggggggcgcagtgcacacgagggggctggacttcgcctgtgatatctacatctgggcgcccttggccgggacttgtggggtccttctcctgtcactggttatcaccaaacggggcagaaagaaactcctgtatatattcaaacaaccatttatgagaccagtacaaactactcaagaggaagatggctgtagctgccgatttccagaagaagaagaaggaggatgtgaactgagagtgaagttcagcaggagcgcagacgcccccgcgtacaagcagggccagaaccagctctataacgagctcaatctaggacgaagagaggagtacgatgttttggacaagaggcgtggccgggaccctgagatggggggaaagccgagaaggaagaaccctcaggaaggcctgtacaatgaactgcagaaagataagatggcggaggcctacagtgagattgggatgaaaggcgagcgccggaggggcaaggggcacgatggcctttaccagggtctcagtacagccaccaaggacacctacgacgcccttcacatgcaggccctgccccctcgctaatctagaggcgcgcccctctccctcccccccccctaacgttactggccgaagccgcttggaataaggccggtgtgcgtttgtctatatgttattttccaccatattgccgtcttttggcaatgtgagggcccggaaacctggccctgtcttcttgacgagcattcctaggggtctttcccctctcgccaaaggaatgcaaggtctgttgaatgtcgtgaaggaagcagttcctctggaagcttcttgaagacaaacaacgtctgtagcgaccctttgcaggcagcggaaccccccacctggcgacaggtgcctctgcggccaaaagccacgtgtataagatacacctgcaaaggcggcacaaccccagtgccacgttgtgagttggatagttgtggaaagagtcaaatggctctcctcaagcgtattcaacaaggggctgaaggatgcccagaaggtaccccattgtatgggatctgatctggggcctcggtacacatgctttacatgtgtttagtcgaggttaaaaaaacgtctaggccccccgaaccacggggacgtggttttcctttgaaaaacacgatgataatatggccacaacccatatgatggccttaccagtgaccgccttgctcctgccgctggccttgctgctccacgccgccaggccggatatccagatgacccagagcccaagctccctgtccgcctctgtgggcgacagggtgaccatcacatgccgcgccagccagacaatctggtcctacctgaactggtatcagcagagacccggcaaggcccctaatctgctgatctacgcagcatctagcctgcagtctggagtgccctcccggttctctggaagaggatccggaaccgacttcaccctgacaatctcctctctgcaggccgaggacttcgccacatactattgccagcagagctattccatccctcagacctttggccagggcacaaagctggagatcaagggcggcggcggctctggaggaggaggaagcggaggaggaggatcccaggtgcagctgcagcagagcggaccaggactggtgaagccctcccagaccctgtctctgacatgtgccatcagcggcgattccgtgagctccaacagcgccgcctggaattggatccggcagtctcccagcagaggactggagtggctgggaaggacctactatcgctccaagtggtacaacgattatgccgtgtctgtgaagagccggatcaccatcaaccctgacacatctaagaatcagttcagcctgcagctgaattccgtgaccccagaggacacagccgtgtactattgtgcaagggaggtgaccggcgacctggaggatgcctttgacatctggggccagggcaccatggtgacagtgtctagcaccacgacgccagcgccgcgaccaccaacaccggcgcccaccatcgcgtcgcagcccctgtccctgcgcccagaggcgtgccggccagcggcggggggcgcagtgcacacgagggggctggacttcgcctgtgatatctacatctgggcgcccttggccgggacttgtggggtccttctcctgtcactggttatcaccctttactgcaaacggggcagaaagaaactcctgtatatattcaaacaaccatttatgagaccagtacaaactactcaagaggaagatggctgtagctgccgatttccagaagaagaagaaggaggatgtgaactgagagtgaagttcagcaggagcgcagacgcccccgcgtacaagcagggccagaaccagctctataacgagctcaatctaggacgaagagaggagtacgatgttttggacaagaggcgtggccgggaccctgagatggggggaaagccgagaaggaagaaccctcaggaaggcctgtacaatgaactgcagaaagataagatggcggaggcctacagtgagattgggatgaaaggcgagcgccggaggggcaaggggcacgatggcctttaccagggtctcagtacagccaccaaggacacctacgacgcccttcacatgcaggccctgccccctcgctaa

SEQ ID NO: 228 - DNA, 3536 bp, Artificial Sequence
  Synthesized
atggccttaccagtgaccgccttgctcctgccgctggccttgctgctccacgccgccaggccggatattgtgatgacccagtccccgtcctccctgaccgtgaccgcgggcgaaaaagtgaccatgatttgcaaatcctcccagtccctgctgaattccggcgatcagaaaaattatctgacctggtatcagcagaaaccgggccagccgccgaaactgctgattttttgggcgtccacccgtgaatccggcgtgccggatcgttttaccggctccggctccggcaccgattttaccctgaccatttcctccgtgcaggcggaagatctggcggtgtattattgccagaatgattattcctatccgctgacctttggcgcgggcaccaaactggaactgaaaggcggcggcggctccggcggcggcggctccggcggcggcggctcccaggtgcagctgcagcagtccgatgcggaactggtgaaaccgggctcctccgtgaaaatttcctgcaaagcgtccggctatacctttaccgatcatgcgattcattgggtgaaacagaaaccggaacagggcctggaatggattggccatttttccccgggcaataccgatattaaatataatgataaatttaaaggcaaagcgaccctgaccgtggatcgttcctcctccaccgcgtatatgcagctgaattccctgacctccgaagattccgcggtgtatttttgcaaaacctccacctttttttttgattattggggccagggcaccaccctgaccgtgtcctccaccacgacgccagcgccgcgaccaccaacaccggcgcccaccatcgcgtcgcagcccctgtccctgcgcccagaggcgtgccggccagcggcggggggcgcagtgcacacgagggggctggacttcgcctgtgatatctacatctgggcgcccttggccgggacttgtggggtccttctcctgtcactggttatcaccctttactgcaaacggggcagaaagaaactcctgtatatattcaaacaaccatttatgagaccagtacaaactactcaagaggaagatggctgtagctgccgatttccagaagaagaagaaggaggatgtgaactgagagtgaagttcagcaggagcgcagacgcccccgcgtacaagcagggccagaaccagctctataacgagctcaatctaggacgaagagaggagtacgatgttttggacaagaggcgtggccgggaccctgagatggggggaaagccgagaaggaagaaccctcaggaaggcctgtacaatgaactgcagaaagataagatggcggaggcctacagtgagattgggatgaaaggcgagcgccggaggggcaaggggcacgatggcctttaccagggtctcagtacagccaccaaggacacctacgacgcccttcacatgcaggccctgccccctcgctaatctagaggcgcgcccctctccctcccccccccctaacgttactggccgaagccgcttggaataaggccggtgtgcgtttgtctatatgttattttccaccatattgccgtcttttggcaatgtgagggcccggaaacctggccctgtcttcttgacgagcattcctaggggtctttcccctctcgccaaaggaatgcaaggtctgttgaatgtcgtgaaggaagcagttcctctggaagcttcttgaagacaaacaacgtctgtagcgaccctttgcaggcagcggaaccccccacctggcgacaggtgcctctgcggccaaaagccacgtgtataagatacacctgcaaaggcggcacaaccccagtgccacgttgtgagttggatagttgtggaaagagtcaaatggctctcctcaagcgtattcaacaaggggctgaaggatgcccagaaggtaccccattgtatgggatctgatctggggcctcggtacacatgctttacatgtgtttagtcgaggttaaaaaaacgtctaggccccccgaaccacggggacgtggttttcctttgaaaaacacgatgataatatggccacaacccatatgatggccttaccagtgaccgccttgctcctgccgctggccttgctgctccacgccgccaggccggatatccagatgacccagagcccaagctccctgtccgcctctgtgggcgacagggtgaccatcacatgccgcgccagccagacaatctggtcctacctgaactggtatcagcagagacccggcaaggcccctaatctgctgatctacgcagcatctagcctgcagtctggagtgccctcccggttctctggaagaggatccggaaccgacttcaccctgacaatctcctctctgcaggccgaggacttcgccacatactattgccagcagagctattccatccctcagacctttggccagggcacaaagctggagatcaagggcggcggcggctctggaggaggaggaagcggaggaggaggatcccaggtgcagctgcagcagagcggaccaggactggtgaagccctcccagaccctgtctctgacatgtgccatcagcggcgattccgtgagctccaacagcgccgcctggaattggatccggcagtctcccagcagaggactggagtggctgggaaggacctactatcgctccaagtggtacaacgattatgccgtgtctgtgaagagccggatcaccatcaaccctgacacatctaagaatcagttcagcctgcagctgaattccgtgaccccagaggacacagccgtgtactattgtgcaagggaggtgaccggcgacctggaggatgcctttgacatctggggccagggcaccatggtgacagtgtctagcaccacgacgccagcgccgcgaccaccaacaccggcgcccaccatcgcgtcgcagcccctgtccctgcgcccagaggcgtgccggccagcggcggggggcgcagtgcacacgagggggctggacttcgcctgtgatatctacatctgggcgcccttggccgggacttgtggggtccttctcctgtcactggttatcaccaaacggggcagaaagaaactcctgtatatattcaaacaaccatttatgagaccagtacaaactactcaagaggaagatggctgtagctgccgatttccagaagaagaagaaggaggatgtgaactgagagtgaagttcagcaggagcgcagacgcccccgcgtacaagcagggccagaaccagctctataacgagctcaatctaggacgaagagaggagtacgatgttttggacaagaggcgtggccgggaccctgagatggggggaaagccgagaaggaagaaccctcaggaaggcctgtacaatgaactgcagaaagataagatggcggaggcctacagtgagattgggatgaaaggcgagcgccggaggggcaaggggcacgatggcctttaccagggtctcagtacagccaccaaggacacctacgacgcccttcacatgcaggccctgccccctcgctaa

SEQ ID NO: 229 - protein, 487 aa, Artificial Sequence
  Synthesized
MALPVTALLLPLALLLHAARPDIQMTQSPSSLSASVGDRVTITCRASQTIWSYLNWYQQRPGKAPNLLIYAASSLQSGVPSRFSGRGSGTDFTLTISSLQAEDFATYYCQQSYSIPQTFGQGTKLEIKGGGGSGGGGSGGGGSQVQLQQSGPGLVKPSQTLSLTCAISGDSVSSNSAAWNWIRQSPSRGLEWLGRTYYRSKWYNDYAVSVKSRITINPDTSKNQFSLQLNSVTPEDTAVYYCAREVTGDLEDAFDIWGQGTMVTVSSTTTPAPRPPTPAPTIASQPLSLRPEACRPAAGGAVHTRGLDFACDIYIWAPLAGTCGVLLLSLVITKRGRKKLLYIFKQPFMRPVQTTQEEDGCSCRFPEEEEGGCELRVKFSRSADAPAYQQGQNQLYNELNLGRREEYDVLDKRRGRDPEMGGKPRRKNPQEGLYNELQKDKMAEAYSEIGMKGERRRGKGHDGLYQGLSTATKDTYDALHMQALPPR

SEQ ID NO: 230 - DNA, 3527 bp, Artificial Sequence
  Synthesized
atggccttaccagtgaccgccttgctcctgccgctggccttgctgctccacgccgccaggccggatattgtgatgacccagtccccgtcctccctgaccgtgaccgcgggcgaaaaagtgaccatgatttgcaaatcctcccagtccctgctgaattccggcgatcagaaaaattatctgacctggtatcagcagaaaccgggccagccgccgaaactgctgattttttgggcgtccacccgtgaatccggcgtgccggatcgttttaccggctccggctccggcaccgattttaccctgaccatttcctccgtgcaggcggaagatctggcggtgtattattgccagaatgattattcctatccgctgacctttggcgcgggcaccaaactggaactgaaaggcggcggcggctccggcggcggcggctccggcggcggcggctcccaggtgcagctgcagcagtccgatgcggaactggtgaaaccgggctcctccgtgaaaatttcctgcaaagcgtccggctatacctttaccgatcatgcgattcattgggtgaaacagaaaccggaacagggcctggaatggattggccatttttccccgggcaataccgatattaaatataatgataaatttaaaggcaaagcgaccctgaccgtggatcgttcctcctccaccgcgtatatgcagctgaattccctgacctccgaagattccgcggtgtatttttgcaaaacctccacctttttttttgattattggggccagggcaccaccctgaccgtgtcctccaccacgacgccagcgccgcgaccaccaacaccggcgcccaccatcgcgtcgcagcccctgtccctgcgcccagaggcgtgccggccagcggcggggggcgcagtgcacacgagggggctggacttcgcctgtgatatctacatctgggcgcccttggccgggacttgtggggtccttctcctgtcactggttatcaccaaacggggcagaaagaaactcctgtatatattcaaacaaccatttatgagaccagtacaaactactcaagaggaagatggctgtagctgccgatttccagaagaagaagaaggaggatgtgaactgagagtgaagttcagcaggagcgcagacgcccccgcgtacaagcagggccagaaccagctctataacgagctcaatctaggacgaagagaggagtacgatgttttggacaagaggcgtggccgggaccctgagatggggggaaagccgagaaggaagaaccctcaggaaggcctgtacaatgaactgcagaaagataagatggcggaggcctacagtgagattgggatgaaaggcgagcgccggaggggcaaggggcacgatggcctttaccagggtctcagtacagccaccaaggacacctacgacgcccttcacatgcaggccctgccccctcgctaatctagaggcgcgcccctctccctcccccccccctaacgttactggccgaagccgcttggaataaggccggtgtgcgtttgtctatatgttattttccaccatattgccgtcttttggcaatgtgagggcccggaaacctggccctgtcttcttgacgagcattcctaggggtctttcccctctcgccaaaggaatgcaaggtctgttgaatgtcgtgaaggaagcagttcctctggaagcttcttgaagacaaacaacgtctgtagcgaccctttgcaggcagcggaaccccccacctggcgacaggtgcctctgcggccaaaagccacgtgtataagatacacctgcaaaggcggcacaaccccagtgccacgttgtgagttggatagttgtggaaagagtcaaatggctctcctcaagcgtattcaacaaggggctgaaggatgcccagaaggtaccccattgtatgggatctgatctggggcctcggtacacatgctttacatgtgtttagtcgaggttaaaaaaacgtctaggccccccgaaccacggggacgtggttttcctttgaaaaacacgatgataatatggccacaacccatatgatggccttaccagtgaccgccttgctcctgccgctggccttgctgctccacgccgccaggccggatatccagatgacccagagcccaagctccctgtccgcctctgtgggcgacagggtgaccatcacatgccgcgccagccagacaatctggtcctacctgaactggtatcagcagagacccggcaaggcccctaatctgctgatctacgcagcatctagcctgcagtctggagtgccctcccggttctctggaagaggatccggaaccgacttcaccctgacaatctcctctctgcaggccgaggacttcgccacatactattgccagcagagctattccatccctcagacctttggccagggcacaaagctggagatcaagggcggcggcggctctggaggaggaggaagcggaggaggaggatcccaggtgcagctgcagcagagcggaccaggactggtgaagccctcccagaccctgtctctgacatgtgccatcagcggcgattccgtgagctccaacagcgccgcctggaattggatccggcagtctcccagcagaggactggagtggctgggaaggacctactatcgctccaagtggtacaacgattatgccgtgtctgtgaagagccggatcaccatcaaccctgacacatctaagaatcagttcagcctgcagctgaattccgtgaccccagaggacacagccgtgtactattgtgcaagggaggtgaccggcgacctggaggatgcctttgacatctggggccagggcaccatggtgacagtgtctagcaccacgacgccagcgccgcgaccaccaacaccggcgcccaccatcgcgtcgcagcccctgtccctgcgcccagaggcgtgccggccagcggcggggggcgcagtgcacacgagggggctggacttcgcctgtgatatctacatctgggcgcccttggccgggacttgtggggtccttctcctgtcactggttatcaccaaacggggcagaaagaaactcctgtatatattcaaacaaccatttatgagaccagtacaaactactcaagaggaagatggctgtagctgccgatttccagaagaagaagaaggaggatgtgaactgagagtgaagttcagcaggagcgcagacgcccccgcgtacaagcagggccagaaccagctctataacgagctcaatctaggacgaagagaggagtacgatgttttggacaagaggcgtggccgggaccctgagatggggggaaagccgagaaggaagaaccctcaggaaggcctgtacaatgaactgcagaaagataagatggcggaggcctacagtgagattgggatgaaaggcgagcgccggaggggcaaggggcacgatggcctttaccagggtctcagtacagccaccaaggacacctacgacgcccttcacatgcaggccctgccccctcgctaa

SEQ ID NO: 231 - DNA, 3545 bp, Artificial Sequence
  Synthesized
atggccttaccagtgaccgccttgctcctgccgctggccttgctgctccacgccgccaggccggacatcgtgatgacccagtccccctccagcctgacagtgacagccggcgagaaggtgacaatgatctgtaagtccagccagagcctgctgaacagcggcgaccagaagaactacctgacctggtaccagcagaagcctggccagccccccaagctgctgatcttctgggccagcacaagggagagcggcgtgcccgacagattcacaggcagcggcagcggcaccgacttcacactgaccatttcctccgtgcaggccgaggacctcgccgtgtactactgccagaacgactactcctaccccctgacattcggcgccggcaccaaactggagctgaagggtggcggtggctcgggcggtggtgggtcgggtggcggcggatctcaggtgcagctccagcagtccgatgccgagctggtgaagcccggaagcagcgtcaagatcagctgtaaggcctccggctacaccttcacagaccacgccatccactgggtgaagcagaagcccgagcagggcctggagtggatcggccactttagccccggaaacaccgacatcaagtacaacgacaagttcaagggcaaggccaccctgaccgtggacaggagcagcagcaccgcctacatgcagctgaacagcctgacaagcgaggacagcgccgtgtacttctgcaagacctccaccttcttcttcgactactggggccagggaaccaccctgacagtgtccagcaccacgacgccagcgccgcgaccaccaacaccggcgcccaccatcgcgtcgcagcccctgtccctgcgcccagaggcgtgccggccagcggcggggggcgcagtgcacacgagggggctggacttcgcctgtgatatctacatctgggcgcccttggccgggacttgtggggtccttctcctgtcactggttatcaccctttactgcaaacggggcagaaagaaactcctgtatatattcaaacaaccatttatgagaccagtacaaactactcaagaggaagatggctgtagctgccgatttccagaagaagaagaaggaggatgtgaactgagagtgaagttcagcaggagcgcagacgcccccgcgtacaagcagggccagaaccagctctataacgagctcaatctaggacgaagagaggagtacgatgttttggacaagaggcgtggccgggaccctgagatggggggaaagccgagaaggaagaaccctcaggaaggcctgtacaatgaactgcagaaagataagatggcggaggcctacagtgagattgggatgaaaggcgagcgccggaggggcaaggggcacgatggcctttaccagggtctcagtacagccaccaaggacacctacgacgcccttcacatgcaggccctgccccctcgctaatctagaggcgcgcccctctccctcccccccccctaacgttactggccgaagccgcttggaataaggccggtgtgcgtttgtctatatgttattttccaccatattgccgtcttttggcaatgtgagggcccggaaacctggccctgtcttcttgacgagcattcctaggggtctttcccctctcgccaaaggaatgcaaggtctgttgaatgtcgtgaaggaagcagttcctctggaagcttcttgaagacaaacaacgtctgtagcgaccctttgcaggcagcggaaccccccacctggcgacaggtgcctctgcggccaaaagccacgtgtataagatacacctgcaaaggcggcacaaccccagtgccacgttgtgagttggatagttgtggaaagagtcaaatggctctcctcaagcgtattcaacaaggggctgaaggatgcccagaaggtaccccattgtatgggatctgatctggggcctcggtacacatgctttacatgtgtttagtcgaggttaaaaaaacgtctaggccccccgaaccacggggacgtggttttcctttgaaaaacacgatgataatatggccacaacccatatgatggccttaccagtgaccgccttgctcctgccgctggccttgctgctccacgccgccaggccggatatccagatgacccagagcccaagctccctgtccgcctctgtgggcgacagggtgaccatcacatgccgcgccagccagacaatctggtcctacctgaactggtatcagcagagacccggcaaggcccctaatctgctgatctacgcagcatctagcctgcagtctggagtgccctcccggttctctggaagaggatccggaaccgacttcaccctgacaatctcctctctgcaggccgaggacttcgccacatactattgccagcagagctattccatccctcagacctttggccagggcacaaagctggagatcaagggcggcggcggctctggaggaggaggaagcggaggaggaggatcccaggtgcagctgcagcagagcggaccaggactggtgaagccctcccagaccctgtctctgacatgtgccatcagcggcgattccgtgagctccaacagcgccgcctggaattggatccggcagtctcccagcagaggactggagtggctgggaaggacctactatcgctccaagtggtacaacgattatgccgtgtctgtgaagagccggatcaccatcaaccctgacacatctaagaatcagttcagcctgcagctgaattccgtgaccccagaggacacagccgtgtactattgtgcaagggaggtgaccggcgacctggaggatgcctttgacatctggggccagggcaccatggtgacagtgtctagcaccacgacgccagcgccgcgaccaccaacaccggcgcccaccatcgcgtcgcagcccctgtccctgcgcccagaggcgtgccggccagcggcggggggcgcagtgcacacgagggggctggacttcgcctgtgatatctacatctgggcgcccttggccgggacttgtggggtccttctcctgtcactggttatcaccctttactgcaaacggggcagaaagaaactcctgtatatattcaaacaaccatttatgagaccagtacaaactactcaagaggaagatggctgtagctgccgatttccagaagaagaagaaggaggatgtgaactgagagtgaagttcagcaggagcgcagacgcccccgcgtacaagcagggccagaaccagctctataacgagctcaatctaggacgaagagaggagtacgatgttttggacaagaggcgtggccgggaccctgagatggggggaaagccgagaaggaagaaccctcaggaaggcctgtacaatgaactgcagaaagataagatggcggaggcctacagtgagattgggatgaaaggcgagcgccggaggggcaaggggcacgatggcctttaccagggtctcagtacagccaccaaggacacctacgacgcccttcacatgcaggccctgccccctcgctaa

SEQ ID NO: 232 - DNA, 3536 bp, Artificial Sequence
  Synthesized
atggccttaccagtgaccgccttgctcctgccgctggccttgctgctccacgccgccaggccggacatcgtgatgacccagtccccctccagcctgacagtgacagccggcgagaaggtgacaatgatctgtaagtccagccagagcctgctgaacagcggcgaccagaagaactacctgacctggtaccagcagaagcctggccagccccccaagctgctgatcttctgggccagcacaagggagagcggcgtgcccgacagattcacaggcagcggcagcggcaccgacttcacactgaccatttcctccgtgcaggccgaggacctcgccgtgtactactgccagaacgactactcctaccccctgacattcggcgccggcaccaaactggagctgaagggtggcggtggctcgggcggtggtgggtcgggtggcggcggatctcaggtgcagctccagcagtccgatgccgagctggtgaagcccggaagcagcgtcaagatcagctgtaaggcctccggctacaccttcacagaccacgccatccactgggtgaagcagaagcccgagcagggcctggagtggatcggccactttagccccggaaacaccgacatcaagtacaacgacaagttcaagggcaaggccaccctgaccgtggacaggagcagcagcaccgcctacatgcagctgaacagcctgacaagcgaggacagcgccgtgtacttctgcaagacctccaccttcttcttcgactactggggccagggaaccaccctgacagtgtccagcaccacgacgccagcgccgcgaccaccaacaccggcgcccaccatcgcgtcgcagcccctgtccctgcgcccagaggcgtgccggccagcggcggggggcgcagtgcacacgagggggctggacttcgcctgtgatatctacatctgggcgcccttggccgggacttgtggggtccttctcctgtcactggttatcaccaaacggggcagaaagaaactcctgtatatattcaaacaaccatttatgagaccagtacaaactactcaagaggaagatggctgtagctgccgatttccagaagaagaagaaggaggatgtgaactgagagtgaagttcagcaggagcgcagacgcccccgcgtacaagcagggccagaaccagctctataacgagctcaatctaggacgaagagaggagtacgatgttttggacaagaggcgtggccgggaccctgagatggggggaaagccgagaaggaagaaccctcaggaaggcctgtacaatgaactgcagaaagataagatggcggaggcctacagtgagattgggatgaaaggcgagcgccggaggggcaaggggcacgatggcctttaccagggtctcagtacagccaccaaggacacctacgacgcccttcacatgcaggccctgccccctcgctaatctagaggcgcgcccctctccctcccccccccctaacgttactggccgaagccgcttggaataaggccggtgtgcgtttgtctatatgttattttccaccatattgccgtcttttggcaatgtgagggcccggaaacctggccctgtcttcttgacgagcattcctaggggtctttcccctctcgccaaaggaatgcaaggtctgttgaatgtcgtgaaggaagcagttcctctggaagcttcttgaagacaaacaacgtctgtagcgaccctttgcaggcagcggaaccccccacctggcgacaggtgcctctgcggccaaaagccacgtgtataagatacacctgcaaaggcggcacaaccccagtgccacgttgtgagttggatagttgtggaaagagtcaaatggctctcctcaagcgtattcaacaaggggctgaaggatgcccagaaggtaccccattgtatgggatctgatctggggcctcggtacacatgctttacatgtgtttagtcgaggttaaaaaaacgtctaggccccccgaaccacggggacgtggttttcctttgaaaaacacgatgataatatggccacaacccatatgatggccttaccagtgaccgccttgctcctgccgctggccttgctgctccacgccgccaggccggatatccagatgacccagagcccaagctccctgtccgcctctgtgggcgacagggtgaccatcacatgccgcgccagccagacaatctggtcctacctgaactggtatcagcagagacccggcaaggcccctaatctgctgatctacgcagcatctagcctgcagtctggagtgccctcccggttctctggaagaggatccggaaccgacttcaccctgacaatctcctctctgcaggccgaggacttcgccacatactattgccagcagagctattccatccctcagacctttggccagggcacaaagctggagatcaagggcggcggcggctctggaggaggaggaagcggaggaggaggatcccaggtgcagctgcagcagagcggaccaggactggtgaagccctcccagaccctgtctctgacatgtgccatcagcggcgattccgtgagctccaacagcgccgcctggaattggatccggcagtctcccagcagaggactggagtggctgggaaggacctactatcgctccaagtggtacaacgattatgccgtgtctgtgaagagccggatcaccatcaaccctgacacatctaagaatcagttcagcctgcagctgaattccgtgaccccagaggacacagccgtgtactattgtgcaagggaggtgaccggcgacctggaggatgcctttgacatctggggccagggcaccatggtgacagtgtctagcaccacgacgccagcgccgcgaccaccaacaccggcgcccaccatcgcgtcgcagcccctgtccctgcgcccagaggcgtgccggccagcggcggggggcgcagtgcacacgagggggctggacttcgcctgtgatatctacatctgggcgcccttggccgggacttgtggggtccttctcctgtcactggttatcaccctttactgcaaacggggcagaaagaaactcctgtatatattcaaacaaccatttatgagaccagtacaaactactcaagaggaagatggctgtagctgccgatttccagaagaagaagaaggaggatgtgaactgagagtgaagttcagcaggagcgcagacgcccccgcgtacaagcagggccagaaccagctctataacgagctcaatctaggacgaagagaggagtacgatgttttggacaagaggcgtggccgggaccctgagatggggggaaagccgagaaggaagaaccctcaggaaggcctgtacaatgaactgcagaaagataagatggcggaggcctacagtgagattgggatgaaaggcgagcgccggaggggcaaggggcacgatggcctttaccagggtctcagtacagccaccaaggacacctacgacgcccttcacatgcaggccctgccccctcgctaa

SEQ ID NO: 233 - DNA, 3536 bp, Artificial Sequence
  Synthesized
atggccttaccagtgaccgccttgctcctgccgctggccttgctgctccacgccgccaggccggacatcgtgatgacccagtccccctccagcctgacagtgacagccggcgagaaggtgacaatgatctgtaagtccagccagagcctgctgaacagcggcgaccagaagaactacctgacctggtaccagcagaagcctggccagccccccaagctgctgatcttctgggccagcacaagggagagcggcgtgcccgacagattcacaggcagcggcagcggcaccgacttcacactgaccatttcctccgtgcaggccgaggacctcgccgtgtactactgccagaacgactactcctaccccctgacattcggcgccggcaccaaactggagctgaagggtggcggtggctcgggcggtggtgggtcgggtggcggcggatctcaggtgcagctccagcagtccgatgccgagctggtgaagcccggaagcagcgtcaagatcagctgtaaggcctccggctacaccttcacagaccacgccatccactgggtgaagcagaagcccgagcagggcctggagtggatcggccactttagccccggaaacaccgacatcaagtacaacgacaagttcaagggcaaggccaccctgaccgtggacaggagcagcagcaccgcctacatgcagctgaacagcctgacaagcgaggacagcgccgtgtacttctgcaagacctccaccttcttcttcgactactggggccagggaaccaccctgacagtgtccagcaccacgacgccagcgccgcgaccaccaacaccggcgcccaccatcgcgtcgcagcccctgtccctgcgcccagaggcgtgccggccagcggcggggggcgcagtgcacacgagggggctggacttcgcctgtgatatctacatctgggcgcccttggccgggacttgtggggtccttctcctgtcactggttatcaccctttactgcaaacggggcagaaagaaactcctgtatatattcaaacaaccatttatgagaccagtacaaactactcaagaggaagatggctgtagctgccgatttccagaagaagaagaaggaggatgtgaactgagagtgaagttcagcaggagcgcagacgcccccgcgtacaagcagggccagaaccagctctataacgagctcaatctaggacgaagagaggagtacgatgttttggacaagaggcgtggccgggaccctgagatggggggaaagccgagaaggaagaaccctcaggaaggcctgtacaatgaactgcagaaagataagatggcggaggcctacagtgagattgggatgaaaggcgagcgccggaggggcaaggggcacgatggcctttaccagggtctcagtacagccaccaaggacacctacgacgcccttcacatgcaggccctgccccctcgctaatctagaggcgcgcccctctccctcccccccccctaacgttactggccgaagccgcttggaataaggccggtgtgcgtttgtctatatgttattttccaccatattgccgtcttttggcaatgtgagggcccggaaacctggccctgtcttcttgacgagcattcctaggggtctttcccctctcgccaaaggaatgcaaggtctgttgaatgtcgtgaaggaagcagttcctctggaagcttcttgaagacaaacaacgtctgtagcgaccctttgcaggcagcggaaccccccacctggcgacaggtgcctctgcggccaaaagccacgtgtataagatacacctgcaaaggcggcacaaccccagtgccacgttgtgagttggatagttgtggaaagagtcaaatggctctcctcaagcgtattcaacaaggggctgaaggatgcccagaaggtaccccattgtatgggatctgatctggggcctcggtacacatgctttacatgtgtttagtcgaggttaaaaaaacgtctaggccccccgaaccacggggacgtggttttcctttgaaaaacacgatgataatatggccacaacccatatgatggccttaccagtgaccgccttgctcctgccgctggccttgctgctccacgccgccaggccggatatccagatgacccagagcccaagctccctgtccgcctctgtgggcgacagggtgaccatcacatgccgcgccagccagacaatctggtcctacctgaactggtatcagcagagacccggcaaggcccctaatctgctgatctacgcagcatctagcctgcagtctggagtgccctcccggttctctggaagaggatccggaaccgacttcaccctgacaatctcctctctgcaggccgaggacttcgccacatactattgccagcagagctattccatccctcagacctttggccagggcacaaagctggagatcaagggcggcggcggctctggaggaggaggaagcggaggaggaggatcccaggtgcagctgcagcagagcggaccaggactggtgaagccctcccagaccctgtctctgacatgtgccatcagcggcgattccgtgagctccaacagcgccgcctggaattggatccggcagtctcccagcagaggactggagtggctgggaaggacctactatcgctccaagtggtacaacgattatgccgtgtctgtgaagagccggatcaccatcaaccctgacacatctaagaatcagttcagcctgcagctgaattccgtgaccccagaggacacagccgtgtactattgtgcaagggaggtgaccggcgacctggaggatgcctttgacatctggggccagggcaccatggtgacagtgtctagcaccacgacgccagcgccgcgaccaccaacaccggcgcccaccatcgcgtcgcagcccctgtccctgcgcccagaggcgtgccggccagcggcggggggcgcagtgcacacgagggggctggacttcgcctgtgatatctacatctgggcgcccttggccgggacttgtggggtccttctcctgtcactggttatcaccaaacggggcagaaagaaactcctgtatatattcaaacaaccatttatgagaccagtacaaactactcaagaggaagatggctgtagctgccgatttccagaagaagaagaaggaggatgtgaactgagagtgaagttcagcaggagcgcagacgcccccgcgtacaagcagggccagaaccagctctataacgagctcaatctaggacgaagagaggagtacgatgttttggacaagaggcgtggccgggaccctgagatggggggaaagccgagaaggaagaaccctcaggaaggcctgtacaatgaactgcagaaagataagatggcggaggcctacagtgagattgggatgaaaggcgagcgccggaggggcaaggggcacgatggcctttaccagggtctcagtacagccaccaaggacacctacgacgcccttcacatgcaggccctgccccctcgctaa

SEQ ID NO: 234 - DNA, 3527 bp, Artificial Sequence
  Synthesized
atggccttaccagtgaccgccttgctcctgccgctggccttgctgctccacgccgccaggccggacatcgtgatgacccagtccccctccagcctgacagtgacagccggcgagaaggtgacaatgatctgtaagtccagccagagcctgctgaacagcggcgaccagaagaactacctgacctggtaccagcagaagcctggccagccccccaagctgctgatcttctgggccagcacaagggagagcggcgtgcccgacagattcacaggcagcggcagcggcaccgacttcacactgaccatttcctccgtgcaggccgaggacctcgccgtgtactactgccagaacgactactcctaccccctgacattcggcgccggcaccaaactggagctgaagggtggcggtggctcgggcggtggtgggtcgggtggcggcggatctcaggtgcagctccagcagtccgatgccgagctggtgaagcccggaagcagcgtcaagatcagctgtaaggcctccggctacaccttcacagaccacgccatccactgggtgaagcagaagcccgagcagggcctggagtggatcggccactttagccccggaaacaccgacatcaagtacaacgacaagttcaagggcaaggccaccctgaccgtggacaggagcagcagcaccgcctacatgcagctgaacagcctgacaagcgaggacagcgccgtgtacttctgcaagacctccaccttcttcttcgactactggggccagggaaccaccctgacagtgtccagcaccacgacgccagcgccgcgaccaccaacaccggcgcccaccatcgcgtcgcagcccctgtccctgcgcccagaggcgtgccggccagcggcggggggcgcagtgcacacgagggggctggacttcgcctgtgatatctacatctgggcgcccttggccgggacttgtggggtccttctcctgtcactggttatcaccaaacggggcagaaagaaactcctgtatatattcaaacaaccatttatgagaccagtacaaactactcaagaggaagatggctgtagctgccgatttccagaagaagaagaaggaggatgtgaactgagagtgaagttcagcaggagcgcagacgcccccgcgtacaagcagggccagaaccagctctataacgagctcaatctaggacgaagagaggagtacgatgttttggacaagaggcgtggccgggaccctgagatggggggaaagccgagaaggaagaaccctcaggaaggcctgtacaatgaactgcagaaagataagatggcggaggcctacagtgagattgggatgaaaggcgagcgccggaggggcaaggggcacgatggcctttaccagggtctcagtacagccaccaaggacacctacgacgcccttcacatgcaggccctgccccctcgctaatctagaggcgcgcccctctccctcccccccccctaacgttactggccgaagccgcttggaataaggccggtgtgcgtttgtctatatgttattttccaccatattgccgtcttttggcaatgtgagggcccggaaacctggccctgtcttcttgacgagcattcctaggggtctttcccctctcgccaaaggaatgcaaggtctgttgaatgtcgtgaaggaagcagttcctctggaagcttcttgaagacaaacaacgtctgtagcgaccctttgcaggcagcggaaccccccacctggcgacaggtgcctctgcggccaaaagccacgtgtataagatacacctgcaaaggcggcacaaccccagtgccacgttgtgagttggatagttgtggaaagagtcaaatggctctcctcaagcgtattcaacaaggggctgaaggatgcccagaaggtaccccattgtatgggatctgatctggggcctcggtacacatgctttacatgtgtttagtcgaggttaaaaaaacgtctaggccccccgaaccacggggacgtggttttcctttgaaaaacacgatgataatatggccacaacccatatgatggccttaccagtgaccgccttgctcctgccgctggccttgctgctccacgccgccaggccggatatccagatgacccagagcccaagctccctgtccgcctctgtgggcgacagggtgaccatcacatgccgcgccagccagacaatctggtcctacctgaactggtatcagcagagacccggcaaggcccctaatctgctgatctacgcagcatctagcctgcagtctggagtgccctcccggttctctggaagaggatccggaaccgacttcaccctgacaatctcctctctgcaggccgaggacttcgccacatactattgccagcagagctattccatccctcagacctttggccagggcacaaagctggagatcaagggcggcggcggctctggaggaggaggaagcggaggaggaggatcccaggtgcagctgcagcagagcggaccaggactggtgaagccctcccagaccctgtctctgacatgtgccatcagcggcgattccgtgagctccaacagcgccgcctggaattggatccggcagtctcccagcagaggactggagtggctgggaaggacctactatcgctccaagtggtacaacgattatgccgtgtctgtgaagagccggatcaccatcaaccctgacacatctaagaatcagttcagcctgcagctgaattccgtgaccccagaggacacagccgtgtactattgtgcaagggaggtgaccggcgacctggaggatgcctttgacatctggggccagggcaccatggtgacagtgtctagcaccacgacgccagcgccgcgaccaccaacaccggcgcccaccatcgcgtcgcagcccctgtccctgcgcccagaggcgtgccggccagcggcggggggcgcagtgcacacgagggggctggacttcgcctgtgatatctacatctgggcgcccttggccgggacttgtggggtccttctcctgtcactggttatcaccaaacggggcagaaagaaactcctgtatatattcaaacaaccatttatgagaccagtacaaactactcaagaggaagatggctgtagctgccgatttccagaagaagaagaaggaggatgtgaactgagagtgaagttcagcaggagcgcagacgcccccgcgtacaagcagggccagaaccagctctataacgagctcaatctaggacgaagagaggagtacgatgttttggacaagaggcgtggccgggaccctgagatggggggaaagccgagaaggaagaaccctcaggaaggcctgtacaatgaactgcagaaagataagatggcggaggcctacagtgagattgggatgaaaggcgagcgccggaggggcaaggggcacgatggcctttaccagggtctcagtacagccaccaaggacacctacgacgcccttcacatgcaggccctgccccctcgctaa

SEQ ID NO: 235 - DNA, 3665 bp, Artificial Sequence
  Synthesized
atggccttaccagtgaccgccttgctcctgccgctggccttgctgctccacgccgccaggccggatattgtgatgacccagtccccgtcctccctgaccgtgaccgcgggcgaaaaagtgaccatgatttgcaaatcctcccagtccctgctgaattccggcgatcagaaaaattatctgacctggtatcagcagaaaccgggccagccgccgaaactgctgattttttgggcgtccacccgtgaatccggcgtgccggatcgttttaccggctccggctccggcaccgattttaccctgaccatttcctccgtgcaggcggaagatctggcggtgtattattgccagaatgattattcctatccgctgacctttggcgcgggcaccaaactggaactgaaaggcggcggcggctccggcggcggcggctccggcggcggcggctcccaggtgcagctgcagcagtccgatgcggaactggtgaaaccgggctcctccgtgaaaatttcctgcaaagcgtccggctatacctttaccgatcatgcgattcattgggtgaaacagaaaccggaacagggcctggaatggattggccatttttccccgggcaataccgatattaaatataatgataaatttaaaggcaaagcgaccctgaccgtggatcgttcctcctccaccgcgtatatgcagctgaattccctgacctccgaagattccgcggtgtatttttgcaaaacctccacctttttttttgattattggggccagggcaccaccctgaccgtgtcctccaccacgacgccagcgccgcgaccaccaacaccggcgcccaccatcgcgtcgcagcccctgtccctgcgcccagaggcgtgccggccagcggcggggggcgcagtgcacacgagggggctggacttcgcctgtgatatctacatctgggcgcccttggccgggacttgtggggtccttctcctgtcactggttatcaccctttactgcaaacggggcagaaagaaactcctgtatatattcaaacaaccatttatgagaccagtacaaactactcaagaggaagatggctgtagctgccgatttccagaagaagaagaaggaggatgtgaactgagagtgaagttcagcaggagcgcagacgcccccgcgtacaagcagggccagaaccagctctataacgagctcaatctaggacgaagagaggagtacgatgttttggacaagaggcgtggccgggaccctgagatggggggaaagccgagaaggaagaaccctcaggaaggcctgtacaatgaactgcagaaagataagatggcggaggcctacagtgagattgggatgaaaggcgagcgccggaggggcaaggggcacgatggcctttaccagggtctcagtacagccaccaaggacacctacgacgcccttcacatgcaggccctgccccctcgctaatctagaggcgcgcccctctccctcccccccccctaacgttactggccgaagccgcttggaataaggccggtgtgcgtttgtctatatgttattttccaccatattgccgtcttttggcaatgtgagggcccggaaacctggccctgtcttcttgacgagcattcctaggggtctttcccctctcgccaaaggaatgcaaggtctgttgaatgtcgtgaaggaagcagttcctctggaagcttcttgaagacaaacaacgtctgtagcgaccctttgcaggcagcggaaccccccacctggcgacaggtgcctctgcggccaaaagccacgtgtataagatacacctgcaaaggcggcacaaccccagtgccacgttgtgagttggatagttgtggaaagagtcaaatggctctcctcaagcgtattcaacaaggggctgaaggatgcccagaaggtaccccattgtatgggatctgatctggggcctcggtacacatgctttacatgtgtttagtcgaggttaaaaaaacgtctaggccccccgaaccacggggacgtggttttcctttgaaaaacacgatgataatatggccacaacccatatgatggccttaccagtgaccgccttgctcctgccgctggccttgctgctccacgccgccaggccgatgggctggtcctgcatcatcctgttcctggtggccaccgccaccggcgtgcactccaacatcgtgctgacccagtcccccgcctccctggccgtgtccctgggccagcgggccaccatctcctgccgggcctccgagtccgtggactcctacggcaactccttcatgcactggtaccagcagaagcccggccagccccccaagctgctgatctacctggcctccaacctggagtccggcgtgcccgcccggttctccggctccggctcccggaccgacttcaccctgaccatcgaccccgtggaggccgacgacgtggccacctactactgccagcagaacaacggcgacccctacaccttcggcggcggcaccaagctggagatcatccggggcggcggcggctccggcggcggcggctccggcggcggcggctccatgggctggtcctgcatcatcctgttcctggtggccaccgccaccggcgtgcactccgaggtgcagctggtggagtccggcggcggcctgatgcagcccaagggctccctgaagctgtcctgcgccgcctccggcttcaccttcaagacctacgccctgaactgggtgcggcaggcccccggcaccggcctggagtgggtggcccggatccggtccaagtccaacaactacaccacctactacgccgactccgtgaaggaccggttcaccatctcccgggacgactcccagaacatgctgtacctgcagatgaacaacctgaagaccgaggacaccgccatgtactactgcgtgcggccccagtccggcacctccttcgcctactggggccagggcaccctggtgaccgtgtccgccgccaccacgacgccagcgccgcgaccaccaacaccggcgcccaccatcgcgtcgcagcccctgtccctgcgcccagaggcgtgccggccagcggcggggggcgcagtgcacacgagggggctggacttcgcctgtgatatctacatctgggcgcccttggccgggacttgtggggtccttctcctgtcactggttatcaccctttactgcaaacggggcagaaagaaactcctgtatatattcaaacaaccatttatgagaccagtacaaactactcaagaggaagatggctgtagctgccgatttccagaagaagaagaaggaggatgtgaactgagagtgaagttcagcaggagcgcagacgcccccgcgtacaagcagggccagaaccagctctataacgagctcaatctaggacgaagagaggagtacgatgttttggacaagaggcgtggccgggaccctgagatggggggaaagccgagaaggaagaaccctcaggaaggcctgtacaatgaactgcagaaagataagatggcggaggcctacagtgagattgggatgaaaggcgagcgccggaggggcaaggggcacgatggcctttaccagggtctcagtacagccaccaaggacacctacgacgcccttcacatgcaggccctgccccctcgctaa

SEQ ID NO: 236 - protein, 530 aa, Artificial Sequence
  Synthesized
MALPVTALLLPLALLLHAARPMGWSCIILFLVATATGVHSNIVLTQSPASLAVSLGQRATISCRASESVDSYGNSFMHWYQQKPGQPPKLLIYLASNLESGVPARFSGSGSRTDFTLTIDPVEADDVATYYCQQNNGDPYTFGGGTKLEIIRGGGGSGGGGSGGGGSMGWSCIILFLVATATGVHSEVQLVESGGGLMQPKGSLKLSCAASGFTFKTYALNWVRQAPGTGLEWVARIRSKSNNYTTYYADSVKDRFTISRDDSQNMLYLQMNNLKTEDTAMYYCVRPQSGTSFAYWGQGTLVTVSAATTTPAPRPPTPAPTIASQPLSLRPEACRPAAGGAVHTRGLDFACDIYIWAPLAGTCGVLLLSLVITLYCKRGRKKLLYIFKQPFMRPVQTTQEEDGCSCRFPEEEEGGCELRVKFSRSADAPAYQQGQNQLYNELNLGRREEYDVLDKRRGRDPEMGGKPRRKNPQEGLYNELQKDKMAEAYSEIGMKGERRRGKGHDGLYQGLSTATKDTYDALHMQALPPR

SEQ ID NO: 237 - DNA, 3656 bp, Artificial Sequence
  Synthesized
atggccttaccagtgaccgccttgctcctgccgctggccttgctgctccacgccgccaggccggatattgtgatgacccagtccccgtcctccctgaccgtgaccgcgggcgaaaaagtgaccatgatttgcaaatcctcccagtccctgctgaattccggcgatcagaaaaattatctgacctggtatcagcagaaaccgggccagccgccgaaactgctgattttttgggcgtccacccgtgaatccggcgtgccggatcgttttaccggctccggctccggcaccgattttaccctgaccatttcctccgtgcaggcggaagatctggcggtgtattattgccagaatgattattcctatccgctgacctttggcgcgggcaccaaactggaactgaaaggcggcggcggctccggcggcggcggctccggcggcggcggctcccaggtgcagctgcagcagtccgatgcggaactggtgaaaccgggctcctccgtgaaaatttcctgcaaagcgtccggctatacctttaccgatcatgcgattcattgggtgaaacagaaaccggaacagggcctggaatggattggccatttttccccgggcaataccgatattaaatataatgataaatttaaaggcaaagcgaccctgaccgtggatcgttcctcctccaccgcgtatatgcagctgaattccctgacctccgaagattccgcggtgtatttttgcaaaacctccacctttttttttgattattggggccagggcaccaccctgaccgtgtcctccaccacgacgccagcgccgcgaccaccaacaccggcgcccaccatcgcgtcgcagcccctgtccctgcgcccagaggcgtgccggccagcggcggggggcgcagtgcacacgagggggctggacttcgcctgtgatatctacatctgggcgcccttggccgggacttgtggggtccttctcctgtcactggttatcaccaaacggggcagaaagaaactcctgtatatattcaaacaaccatttatgagaccagtacaaactactcaagaggaagatggctgtagctgccgatttccagaagaagaagaaggaggatgtgaactgagagtgaagttcagcaggagcgcagacgcccccgcgtacaagcagggccagaaccagctctataacgagctcaatctaggacgaagagaggagtacgatgttttggacaagaggcgtggccgggaccctgagatggggggaaagccgagaaggaagaaccctcaggaaggcctgtacaatgaactgcagaaagataagatggcggaggcctacagtgagattgggatgaaaggcgagcgccggaggggcaaggggcacgatggcctttaccagggtctcagtacagccaccaaggacacctacgacgcccttcacatgcaggccctgccccctcgctaatctagaggcgcgcccctctccctcccccccccctaacgttactggccgaagccgcttggaataaggccggtgtgcgtttgtctatatgttattttccaccatattgccgtcttttggcaatgtgagggcccggaaacctggccctgtcttcttgacgagcattcctaggggtctttcccctctcgccaaaggaatgcaaggtctgttgaatgtcgtgaaggaagcagttcctctggaagcttcttgaagacaaacaacgtctgtagcgaccctttgcaggcagcggaaccccccacctggcgacaggtgcctctgcggccaaaagccacgtgtataagatacacctgcaaaggcggcacaaccccagtgccacgttgtgagttggatagttgtggaaagagtcaaatggctctcctcaagcgtattcaacaaggggctgaaggatgcccagaaggtaccccattgtatgggatctgatctggggcctcggtacacatgctttacatgtgtttagtcgaggttaaaaaaacgtctaggccccccgaaccacggggacgtggttttcctttgaaaaacacgatgataatatggccacaacccatatgatggccttaccagtgaccgccttgctcctgccgctggccttgctgctccacgccgccaggccgatgggctggtcctgcatcatcctgttcctggtggccaccgccaccggcgtgcactccaacatcgtgctgacccagtcccccgcctccctggccgtgtccctgggccagcgggccaccatctcctgccgggcctccgagtccgtggactcctacggcaactccttcatgcactggtaccagcagaagcccggccagccccccaagctgctgatctacctggcctccaacctggagtccggcgtgcccgcccggttctccggctccggctcccggaccgacttcaccctgaccatcgaccccgtggaggccgacgacgtggccacctactactgccagcagaacaacggcgacccctacaccttcggcggcggcaccaagctggagatcatccggggcggcggcggctccggcggcggcggctccggcggcggcggctccatgggctggtcctgcatcatcctgttcctggtggccaccgccaccggcgtgcactccgaggtgcagctggtggagtccggcggcggcctgatgcagcccaagggctccctgaagctgtcctgcgccgcctccggcttcaccttcaagacctacgccctgaactgggtgcggcaggcccccggcaccggcctggagtgggtggcccggatccggtccaagtccaacaactacaccacctactacgccgactccgtgaaggaccggttcaccatctcccgggacgactcccagaacatgctgtacctgcagatgaacaacctgaagaccgaggacaccgccatgtactactgcgtgcggccccagtccggcacctccttcgcctactggggccagggcaccctggtgaccgtgtccgccgccaccacgacgccagcgccgcgaccaccaacaccggcgcccaccatcgcgtcgcagcccctgtccctgcgcccagaggcgtgccggccagcggcggggggcgcagtgcacacgagggggctggacttcgcctgtgatatctacatctgggcgcccttggccgggacttgtggggtccttctcctgtcactggttatcaccctttactgcaaacggggcagaaagaaactcctgtatatattcaaacaaccatttatgagaccagtacaaactactcaagaggaagatggctgtagctgccgatttccagaagaagaagaaggaggatgtgaactgagagtgaagttcagcaggagcgcagacgcccccgcgtacaagcagggccagaaccagctctataacgagctcaatctaggacgaagagaggagtacgatgttttggacaagaggcgtggccgggaccctgagatggggggaaagccgagaaggaagaaccctcaggaaggcctgtacaatgaactgcagaaagataagatggcggaggcctacagtgagattgggatgaaaggcgagcgccggaggggcaaggggcacgatggcctttaccagggtctcagtacagccaccaaggacacctacgacgcccttcacatgcaggccctgccccctcgctaa

SEQ ID NO: 238 - DNA, 3656 bp, Artificial Sequence
  Synthesized
atggccttaccagtgaccgccttgctcctgccgctggccttgctgctccacgccgccaggccggatattgtgatgacccagtccccgtcctccctgaccgtgaccgcgggcgaaaaagtgaccatgatttgcaaatcctcccagtccctgctgaattccggcgatcagaaaaattatctgacctggtatcagcagaaaccgggccagccgccgaaactgctgattttttgggcgtccacccgtgaatccggcgtgccggatcgttttaccggctccggctccggcaccgattttaccctgaccatttcctccgtgcaggcggaagatctggcggtgtattattgccagaatgattattcctatccgctgacctttggcgcgggcaccaaactggaactgaaaggcggcggcggctccggcggcggcggctccggcggcggcggctcccaggtgcagctgcagcagtccgatgcggaactggtgaaaccgggctcctccgtgaaaatttcctgcaaagcgtccggctatacctttaccgatcatgcgattcattgggtgaaacagaaaccggaacagggcctggaatggattggccatttttccccgggcaataccgatattaaatataatgataaatttaaaggcaaagcgaccctgaccgtggatcgttcctcctccaccgcgtatatgcagctgaattccctgacctccgaagattccgcggtgtatttttgcaaaacctccacctttttttttgattattggggccagggcaccaccctgaccgtgtcctccaccacgacgccagcgccgcgaccaccaacaccggcgcccaccatcgcgtcgcagcccctgtccctgcgcccagaggcgtgccggccagcggcggggggcgcagtgcacacgagggggctggacttcgcctgtgatatctacatctgggcgcccttggccgggacttgtggggtccttctcctgtcactggttatcaccctttactgcaaacggggcagaaagaaactcctgtatatattcaaacaaccatttatgagaccagtacaaactactcaagaggaagatggctgtagctgccgatttccagaagaagaagaaggaggatgtgaactgagagtgaagttcagcaggagcgcagacgcccccgcgtacaagcagggccagaaccagctctataacgagctcaatctaggacgaagagaggagtacgatgttttggacaagaggcgtggccgggaccctgagatggggggaaagccgagaaggaagaaccctcaggaaggcctgtacaatgaactgcagaaagataagatggcggaggcctacagtgagattgggatgaaaggcgagcgccggaggggcaaggggcacgatggcctttaccagggtctcagtacagccaccaaggacacctacgacgcccttcacatgcaggccctgccccctcgctaatctagaggcgcgcccctctccctcccccccccctaacgttactggccgaagccgcttggaataaggccggtgtgcgtttgtctatatgttattttccaccatattgccgtcttttggcaatgtgagggcccggaaacctggccctgtcttcttgacgagcattcctaggggtctttcccctctcgccaaaggaatgcaaggtctgttgaatgtcgtgaaggaagcagttcctctggaagcttcttgaagacaaacaacgtctgtagcgaccctttgcaggcagcggaaccccccacctggcgacaggtgcctctgcggccaaaagccacgtgtataagatacacctgcaaaggcggcacaaccccagtgccacgttgtgagttggatagttgtggaaagagtcaaatggctctcctcaagcgtattcaacaaggggctgaaggatgcccagaaggtaccccattgtatgggatctgatctggggcctcggtacacatgctttacatgtgtttagtcgaggttaaaaaaacgtctaggccccccgaaccacggggacgtggttttcctttgaaaaacacgatgataatatggccacaacccatatgatggccttaccagtgaccgccttgctcctgccgctggccttgctgctccacgccgccaggccgatgggctggtcctgcatcatcctgttcctggtggccaccgccaccggcgtgcactccaacatcgtgctgacccagtcccccgcctccctggccgtgtccctgggccagcgggccaccatctcctgccgggcctccgagtccgtggactcctacggcaactccttcatgcactggtaccagcagaagcccggccagccccccaagctgctgatctacctggcctccaacctggagtccggcgtgcccgcccggttctccggctccggctcccggaccgacttcaccctgaccatcgaccccgtggaggccgacgacgtggccacctactactgccagcagaacaacggcgacccctacaccttcggcggcggcaccaagctggagatcatccggggcggcggcggctccggcggcggcggctccggcggcggcggctccatgggctggtcctgcatcatcctgttcctggtggccaccgccaccggcgtgcactccgaggtgcagctggtggagtccggcggcggcctgatgcagcccaagggctccctgaagctgtcctgcgccgcctccggcttcaccttcaagacctacgccctgaactgggtgcggcaggcccccggcaccggcctggagtgggtggcccggatccggtccaagtccaacaactacaccacctactacgccgactccgtgaaggaccggttcaccatctcccgggacgactcccagaacatgctgtacctgcagatgaacaacctgaagaccgaggacaccgccatgtactactgcgtgcggccccagtccggcacctccttcgcctactggggccagggcaccctggtgaccgtgtccgccgccaccacgacgccagcgccgcgaccaccaacaccggcgcccaccatcgcgtcgcagcccctgtccctgcgcccagaggcgtgccggccagcggcggggggcgcagtgcacacgagggggctggacttcgcctgtgatatctacatctgggcgcccttggccgggacttgtggggtccttctcctgtcactggttatcaccaaacggggcagaaagaaactcctgtatatattcaaacaaccatttatgagaccagtacaaactactcaagaggaagatggctgtagctgccgatttccagaagaagaagaaggaggatgtgaactgagagtgaagttcagcaggagcgcagacgcccccgcgtacaagcagggccagaaccagctctataacgagctcaatctaggacgaagagaggagtacgatgttttggacaagaggcgtggccgggaccctgagatggggggaaagccgagaaggaagaaccctcaggaaggcctgtacaatgaactgcagaaagataagatggcggaggcctacagtgagattgggatgaaaggcgagcgccggaggggcaaggggcacgatggcctttaccagggtctcagtacagccaccaaggacacctacgacgcccttcacatgcaggccctgccccctcgctaa

SEQ ID NO: 239 - protein, 527 aa, Artificial Sequence
  Synthesized
MALPVTALLLPLALLLHAARPMGWSCIILFLVATATGVHSNIVLTQSPASLAVSLGQRATISCRASESVDSYGNSFMHWYQQKPGQPPKLLIYLASNLESGVPARFSGSGSRTDFTLTIDPVEADDVATYYCQQNNGDPYTFGGGTKLEIIRGGGGSGGGGSGGGGSMGWSCIILFLVATATGVHSEVQLVESGGGLMQPKGSLKLSCAASGFTFKTYALNWVRQAPGTGLEWVARIRSKSNNYTTYYADSVKDRFTISRDDSQNMLYLQMNNLKTEDTAMYYCVRPQSGTSFAYWGQGTLVTVSAATTTPAPRPPTPAPTIASQPLSLRPEACRPAAGGAVHTRGLDFACDIYIWAPLAGTCGVLLLSLVITKRGRKKLLYIFKQPFMRPVQTTQEEDGCSCRFPEEEEGGCELRVKFSRSADAPAYQQGQNQLYNELNLGRREEYDVLDKRRGRDPEMGGKPRRKNPQEGLYNELQKDKMAEAYSEIGMKGERRRGKGHDGLYQGLSTATKDTYDALHMQALPPR

SEQ ID NO: 240 - DNA, 3665 bp, Artificial Sequence
  Synthesized
atggccttaccagtgaccgccttgctcctgccgctggccttgctgctccacgccgccaggccggacatcgtgatgacccagtccccctccagcctgacagtgacagccggcgagaaggtgacaatgatctgtaagtccagccagagcctgctgaacagcggcgaccagaagaactacctgacctggtaccagcagaagcctggccagccccccaagctgctgatcttctgggccagcacaagggagagcggcgtgcccgacagattcacaggcagcggcagcggcaccgacttcacactgaccatttcctccgtgcaggccgaggacctcgccgtgtactactgccagaacgactactcctaccccctgacattcggcgccggcaccaaactggagctgaagggtggcggtggctcgggcggtggtgggtcgggtggcggcggatctcaggtgcagctccagcagtccgatgccgagctggtgaagcccggaagcagcgtcaagatcagctgtaaggcctccggctacaccttcacagaccacgccatccactgggtgaagcagaagcccgagcagggcctggagtggatcggccactttagccccggaaacaccgacatcaagtacaacgacaagttcaagggcaaggccaccctgaccgtggacaggagcagcagcaccgcctacatgcagctgaacagcctgacaagcgaggacagcgccgtgtacttctgcaagacctccaccttcttcttcgactactggggccagggaaccaccctgacagtgtccagcaccacgacgccagcgccgcgaccaccaacaccggcgcccaccatcgcgtcgcagcccctgtccctgcgcccagaggcgtgccggccagcggcggggggcgcagtgcacacgagggggctggacttcgcctgtgatatctacatctgggcgcccttggccgggacttgtggggtccttctcctgtcactggttatcaccctttactgcaaacggggcagaaagaaactcctgtatatattcaaacaaccatttatgagaccagtacaaactactcaagaggaagatggctgtagctgccgatttccagaagaagaagaaggaggatgtgaactgagagtgaagttcagcaggagcgcagacgcccccgcgtacaagcagggccagaaccagctctataacgagctcaatctaggacgaagagaggagtacgatgttttggacaagaggcgtggccgggaccctgagatggggggaaagccgagaaggaagaaccctcaggaaggcctgtacaatgaactgcagaaagataagatggcggaggcctacagtgagattgggatgaaaggcgagcgccggaggggcaaggggcacgatggcctttaccagggtctcagtacagccaccaaggacacctacgacgcccttcacatgcaggccctgccccctcgctaatctagaggcgcgcccctctccctcccccccccctaacgttactggccgaagccgcttggaataaggccggtgtgcgtttgtctatatgttattttccaccatattgccgtcttttggcaatgtgagggcccggaaacctggccctgtcttcttgacgagcattcctaggggtctttcccctctcgccaaaggaatgcaaggtctgttgaatgtcgtgaaggaagcagttcctctggaagcttcttgaagacaaacaacgtctgtagcgaccctttgcaggcagcggaaccccccacctggcgacaggtgcctctgcggccaaaagccacgtgtataagatacacctgcaaaggcggcacaaccccagtgccacgttgtgagttggatagttgtggaaagagtcaaatggctctcctcaagcgtattcaacaaggggctgaaggatgcccagaaggtaccccattgtatgggatctgatctggggcctcggtacacatgctttacatgtgtttagtcgaggttaaaaaaacgtctaggccccccgaaccacggggacgtggttttcctttgaaaaacacgatgataatatggccacaacccatatgatggccttaccagtgaccgccttgctcctgccgctggccttgctgctccacgccgccaggccgatgggctggtcctgcatcatcctgttcctggtggccaccgccaccggcgtgcactccaacatcgtgctgacccagtcccccgcctccctggccgtgtccctgggccagcgggccaccatctcctgccgggcctccgagtccgtggactcctacggcaactccttcatgcactggtaccagcagaagcccggccagccccccaagctgctgatctacctggcctccaacctggagtccggcgtgcccgcccggttctccggctccggctcccggaccgacttcaccctgaccatcgaccccgtggaggccgacgacgtggccacctactactgccagcagaacaacggcgacccctacaccttcggcggcggcaccaagctggagatcatccggggcggcggcggctccggcggcggcggctccggcggcggcggctccatgggctggtcctgcatcatcctgttcctggtggccaccgccaccggcgtgcactccgaggtgcagctggtggagtccggcggcggcctgatgcagcccaagggctccctgaagctgtcctgcgccgcctccggcttcaccttcaagacctacgccctgaactgggtgcggcaggcccccggcaccggcctggagtgggtggcccggatccggtccaagtccaacaactacaccacctactacgccgactccgtgaaggaccggttcaccatctcccgggacgactcccagaacatgctgtacctgcagatgaacaacctgaagaccgaggacaccgccatgtactactgcgtgcggccccagtccggcacctccttcgcctactggggccagggcaccctggtgaccgtgtccgccgccaccacgacgccagcgccgcgaccaccaacaccggcgcccaccatcgcgtcgcagcccctgtccctgcgcccagaggcgtgccggccagcggcggggggcgcagtgcacacgagggggctggacttcgcctgtgatatctacatctgggcgcccttggccgggacttgtggggtccttctcctgtcactggttatcaccctttactgcaaacggggcagaaagaaactcctgtatatattcaaacaaccatttatgagaccagtacaaactactcaagaggaagatggctgtagctgccgatttccagaagaagaagaaggaggatgtgaactgagagtgaagttcagcaggagcgcagacgcccccgcgtacaagcagggccagaaccagctctataacgagctcaatctaggacgaagagaggagtacgatgttttggacaagaggcgtggccgggaccctgagatggggggaaagccgagaaggaagaaccctcaggaaggcctgtacaatgaactgcagaaagataagatggcggaggcctacagtgagattgggatgaaaggcgagcgccggaggggcaaggggcacgatggcctttaccagggtctcagtacagccaccaaggacacctacgacgcccttcacatgcaggccctgccccctcgctaa

SEQ ID NO: 241 - DNA, 3656 bp, Artificial Sequence
  Synthesized
atggccttaccagtgaccgccttgctcctgccgctggccttgctgctccacgccgccaggccggacatcgtgatgacccagtccccctccagcctgacagtgacagccggcgagaaggtgacaatgatctgtaagtccagccagagcctgctgaacagcggcgaccagaagaactacctgacctggtaccagcagaagcctggccagccccccaagctgctgatcttctgggccagcacaagggagagcggcgtgcccgacagattcacaggcagcggcagcggcaccgacttcacactgaccatttcctccgtgcaggccgaggacctcgccgtgtactactgccagaacgactactcctaccccctgacattcggcgccggcaccaaactggagctgaagggtggcggtggctcgggcggtggtgggtcgggtggcggcggatctcaggtgcagctccagcagtccgatgccgagctggtgaagcccggaagcagcgtcaagatcagctgtaaggcctccggctacaccttcacagaccacgccatccactgggtgaagcagaagcccgagcagggcctggagtggatcggccactttagccccggaaacaccgacatcaagtacaacgacaagttcaagggcaaggccaccctgaccgtggacaggagcagcagcaccgcctacatgcagctgaacagcctgacaagcgaggacagcgccgtgtacttctgcaagacctccaccttcttcttcgactactggggccagggaaccaccctgacagtgtccagcaccacgacgccagcgccgcgaccaccaacaccggcgcccaccatcgcgtcgcagcccctgtccctgcgcccagaggcgtgccggccagcggcggggggcgcagtgcacacgagggggctggacttcgcctgtgatatctacatctgggcgcccttggccgggacttgtggggtccttctcctgtcactggttatcaccaaacggggcagaaagaaactcctgtatatattcaaacaaccatttatgagaccagtacaaactactcaagaggaagatggctgtagctgccgatttccagaagaagaagaaggaggatgtgaactgagagtgaagttcagcaggagcgcagacgcccccgcgtacaagcagggccagaaccagctctataacgagctcaatctaggacgaagagaggagtacgatgttttggacaagaggcgtggccgggaccctgagatggggggaaagccgagaaggaagaaccctcaggaaggcctgtacaatgaactgcagaaagataagatggcggaggcctacagtgagattgggatgaaaggcgagcgccggaggggcaaggggcacgatggcctttaccagggtctcagtacagccaccaaggacacctacgacgcccttcacatgcaggccctgccccctcgctaatctagaggcgcgcccctctccctcccccccccctaacgttactggccgaagccgcttggaataaggccggtgtgcgtttgtctatatgttattttccaccatattgccgtcttttggcaatgtgagggcccggaaacctggccctgtcttcttgacgagcattcctaggggtctttcccctctcgccaaaggaatgcaaggtctgttgaatgtcgtgaaggaagcagttcctctggaagcttcttgaagacaaacaacgtctgtagcgaccctttgcaggcagcggaaccccccacctggcgacaggtgcctctgcggccaaaagccacgtgtataagatacacctgcaaaggcggcacaaccccagtgccacgttgtgagttggatagttgtggaaagagtcaaatggctctcctcaagcgtattcaacaaggggctgaaggatgcccagaaggtaccccattgtatgggatctgatctggggcctcggtacacatgctttacatgtgtttagtcgaggttaaaaaaacgtctaggccccccgaaccacggggacgtggttttcctttgaaaaacacgatgataatatggccacaacccatatgatggccttaccagtgaccgccttgctcctgccgctggccttgctgctccacgccgccaggccgatgggctggtcctgcatcatcctgttcctggtggccaccgccaccggcgtgcactccaacatcgtgctgacccagtcccccgcctccctggccgtgtccctgggccagcgggccaccatctcctgccgggcctccgagtccgtggactcctacggcaactccttcatgcactggtaccagcagaagcccggccagccccccaagctgctgatctacctggcctccaacctggagtccggcgtgcccgcccggttctccggctccggctcccggaccgacttcaccctgaccatcgaccccgtggaggccgacgacgtggccacctactactgccagcagaacaacggcgacccctacaccttcggcggcggcaccaagctggagatcatccggggcggcggcggctccggcggcggcggctccggcggcggcggctccatgggctggtcctgcatcatcctgttcctggtggccaccgccaccggcgtgcactccgaggtgcagctggtggagtccggcggcggcctgatgcagcccaagggctccctgaagctgtcctgcgccgcctccggcttcaccttcaagacctacgccctgaactgggtgcggcaggcccccggcaccggcctggagtgggtggcccggatccggtccaagtccaacaactacaccacctactacgccgactccgtgaaggaccggttcaccatctcccgggacgactcccagaacatgctgtacctgcagatgaacaacctgaagaccgaggacaccgccatgtactactgcgtgcggccccagtccggcacctccttcgcctactggggccagggcaccctggtgaccgtgtccgccgccaccacgacgccagcgccgcgaccaccaacaccggcgcccaccatcgcgtcgcagcccctgtccctgcgcccagaggcgtgccggccagcggcggggggcgcagtgcacacgagggggctggacttcgcctgtgatatctacatctgggcgcccttggccgggacttgtggggtccttctcctgtcactggttatcaccctttactgcaaacggggcagaaagaaactcctgtatatattcaaacaaccatttatgagaccagtacaaactactcaagaggaagatggctgtagctgccgatttccagaagaagaagaaggaggatgtgaactgagagtgaagttcagcaggagcgcagacgcccccgcgtacaagcagggccagaaccagctctataacgagctcaatctaggacgaagagaggagtacgatgttttggacaagaggcgtggccgggaccctgagatggggggaaagccgagaaggaagaaccctcaggaaggcctgtacaatgaactgcagaaagataagatggcggaggcctacagtgagattgggatgaaaggcgagcgccggaggggcaaggggcacgatggcctttaccagggtctcagtacagccaccaaggacacctacgacgcccttcacatgcaggccctgccccctcgctaa

SEQ ID NO: 242 - DNA, 3656 bp, Artificial Sequence
  Synthesized
atggccttaccagtgaccgccttgctcctgccgctggccttgctgctccacgccgccaggccggacatcgtgatgacccagtccccctccagcctgacagtgacagccggcgagaaggtgacaatgatctgtaagtccagccagagcctgctgaacagcggcgaccagaagaactacctgacctggtaccagcagaagcctggccagccccccaagctgctgatcttctgggccagcacaagggagagcggcgtgcccgacagattcacaggcagcggcagcggcaccgacttcacactgaccatttcctccgtgcaggccgaggacctcgccgtgtactactgccagaacgactactcctaccccctgacattcggcgccggcaccaaactggagctgaagggtggcggtggctcgggcggtggtgggtcgggtggcggcggatctcaggtgcagctccagcagtccgatgccgagctggtgaagcccggaagcagcgtcaagatcagctgtaaggcctccggctacaccttcacagaccacgccatccactgggtgaagcagaagcccgagcagggcctggagtggatcggccactttagccccggaaacaccgacatcaagtacaacgacaagttcaagggcaaggccaccctgaccgtggacaggagcagcagcaccgcctacatgcagctgaacagcctgacaagcgaggacagcgccgtgtacttctgcaagacctccaccttcttcttcgactactggggccagggaaccaccctgacagtgtccagcaccacgacgccagcgccgcgaccaccaacaccggcgcccaccatcgcgtcgcagcccctgtccctgcgcccagaggcgtgccggccagcggcggggggcgcagtgcacacgagggggctggacttcgcctgtgatatctacatctgggcgcccttggccgggacttgtggggtccttctcctgtcactggttatcaccctttactgcaaacggggcagaaagaaactcctgtatatattcaaacaaccatttatgagaccagtacaaactactcaagaggaagatggctgtagctgccgatttccagaagaagaagaaggaggatgtgaactgagagtgaagttcagcaggagcgcagacgcccccgcgtacaagcagggccagaaccagctctataacgagctcaatctaggacgaagagaggagtacgatgttttggacaagaggcgtggccgggaccctgagatggggggaaagccgagaaggaagaaccctcaggaaggcctgtacaatgaactgcagaaagataagatggcggaggcctacagtgagattgggatgaaaggcgagcgccggaggggcaaggggcacgatggcctttaccagggtctcagtacagccaccaaggacacctacgacgcccttcacatgcaggccctgccccctcgctaatctagaggcgcgcccctctccctcccccccccctaacgttactggccgaagccgcttggaataaggccggtgtgcgtttgtctatatgttattttccaccatattgccgtcttttggcaatgtgagggcccggaaacctggccctgtcttcttgacgagcattcctaggggtctttcccctctcgccaaaggaatgcaaggtctgttgaatgtcgtgaaggaagcagttcctctggaagcttcttgaagacaaacaacgtctgtagcgaccctttgcaggcagcggaaccccccacctggcgacaggtgcctctgcggccaaaagccacgtgtataagatacacctgcaaaggcggcacaaccccagtgccacgttgtgagttggatagttgtggaaagagtcaaatggctctcctcaagcgtattcaacaaggggctgaaggatgcccagaaggtaccccattgtatgggatctgatctggggcctcggtacacatgctttacatgtgtttagtcgaggttaaaaaaacgtctaggccccccgaaccacggggacgtggttttcctttgaaaaacacgatgataatatggccacaacccatatgatggccttaccagtgaccgccttgctcctgccgctggccttgctgctccacgccgccaggccgatgggctggtcctgcatcatcctgttcctggtggccaccgccaccggcgtgcactccaacatcgtgctgacccagtcccccgcctccctggccgtgtccctgggccagcgggccaccatctcctgccgggcctccgagtccgtggactcctacggcaactccttcatgcactggtaccagcagaagcccggccagccccccaagctgctgatctacctggcctccaacctggagtccggcgtgcccgcccggttctccggctccggctcccggaccgacttcaccctgaccatcgaccccgtggaggccgacgacgtggccacctactactgccagcagaacaacggcgacccctacaccttcggcggcggcaccaagctggagatcatccggggcggcggcggctccggcggcggcggctccggcggcggcggctccatgggctggtcctgcatcatcctgttcctggtggccaccgccaccggcgtgcactccgaggtgcagctggtggagtccggcggcggcctgatgcagcccaagggctccctgaagctgtcctgcgccgcctccggcttcaccttcaagacctacgccctgaactgggtgcggcaggcccccggcaccggcctggagtgggtggcccggatccggtccaagtccaacaactacaccacctactacgccgactccgtgaaggaccggttcaccatctcccgggacgactcccagaacatgctgtacctgcagatgaacaacctgaagaccgaggacaccgccatgtactactgcgtgcggccccagtccggcacctccttcgcctactggggccagggcaccctggtgaccgtgtccgccgccaccacgacgccagcgccgcgaccaccaacaccggcgcccaccatcgcgtcgcagcccctgtccctgcgcccagaggcgtgccggccagcggcggggggcgcagtgcacacgagggggctggacttcgcctgtgatatctacatctgggcgcccttggccgggacttgtggggtccttctcctgtcactggttatcaccaaacggggcagaaagaaactcctgtatatattcaaacaaccatttatgagaccagtacaaactactcaagaggaagatggctgtagctgccgatttccagaagaagaagaaggaggatgtgaactgagagtgaagttcagcaggagcgcagacgcccccgcgtacaagcagggccagaaccagctctataacgagctcaatctaggacgaagagaggagtacgatgttttggacaagaggcgtggccgggaccctgagatggggggaaagccgagaaggaagaaccctcaggaaggcctgtacaatgaactgcagaaagataagatggcggaggcctacagtgagattgggatgaaaggcgagcgccggaggggcaaggggcacgatggcctttaccagggtctcagtacagccaccaaggacacctacgacgcccttcacatgcaggccctgccccctcgctaa

SEQ ID NO: 243 - DNA, 3647 bp, Artificial Sequence
  Synthesized
atggccttaccagtgaccgccttgctcctgccgctggccttgctgctccacgccgccaggccggacatcgtgatgacccagtccccctccagcctgacagtgacagccggcgagaaggtgacaatgatctgtaagtccagccagagcctgctgaacagcggcgaccagaagaactacctgacctggtaccagcagaagcctggccagccccccaagctgctgatcttctgggccagcacaagggagagcggcgtgcccgacagattcacaggcagcggcagcggcaccgacttcacactgaccatttcctccgtgcaggccgaggacctcgccgtgtactactgccagaacgactactcctaccccctgacattcggcgccggcaccaaactggagctgaagggtggcggtggctcgggcggtggtgggtcgggtggcggcggatctcaggtgcagctccagcagtccgatgccgagctggtgaagcccggaagcagcgtcaagatcagctgtaaggcctccggctacaccttcacagaccacgccatccactgggtgaagcagaagcccgagcagggcctggagtggatcggccactttagccccggaaacaccgacatcaagtacaacgacaagttcaagggcaaggccaccctgaccgtggacaggagcagcagcaccgcctacatgcagctgaacagcctgacaagcgaggacagcgccgtgtacttctgcaagacctccaccttcttcttcgactactggggccagggaaccaccctgacagtgtccagcaccacgacgccagcgccgcgaccaccaacaccggcgcccaccatcgcgtcgcagcccctgtccctgcgcccagaggcgtgccggccagcggcggggggcgcagtgcacacgagggggctggacttcgcctgtgatatctacatctgggcgcccttggccgggacttgtggggtccttctcctgtcactggttatcaccaaacggggcagaaagaaactcctgtatatattcaaacaaccatttatgagaccagtacaaactactcaagaggaagatggctgtagctgccgatttccagaagaagaagaaggaggatgtgaactgagagtgaagttcagcaggagcgcagacgcccccgcgtacaagcagggccagaaccagctctataacgagctcaatctaggacgaagagaggagtacgatgttttggacaagaggcgtggccgggaccctgagatggggggaaagccgagaaggaagaaccctcaggaaggcctgtacaatgaactgcagaaagataagatggcggaggcctacagtgagattgggatgaaaggcgagcgccggaggggcaaggggcacgatggcctttaccagggtctcagtacagccaccaaggacacctacgacgcccttcacatgcaggccctgccccctcgctaatctagaggcgcgcccctctccctcccccccccctaacgttactggccgaagccgcttggaataaggccggtgtgcgtttgtctatatgttattttccaccatattgccgtcttttggcaatgtgagggcccggaaacctggccctgtcttcttgacgagcattcctaggggtctttcccctctcgccaaaggaatgcaaggtctgttgaatgtcgtgaaggaagcagttcctctggaagcttcttgaagacaaacaacgtctgtagcgaccctttgcaggcagcggaaccccccacctggcgacaggtgcctctgcggccaaaagccacgtgtataagatacacctgcaaaggcggcacaaccccagtgccacgttgtgagttggatagttgtggaaagagtcaaatggctctcctcaagcgtattcaacaaggggctgaaggatgcccagaaggtaccccattgtatgggatctgatctggggcctcggtacacatgctttacatgtgtttagtcgaggttaaaaaaacgtctaggccccccgaaccacggggacgtggttttcctttgaaaaacacgatgataatatggccacaacccatatgatggccttaccagtgaccgccttgctcctgccgctggccttgctgctccacgccgccaggccgatgggctggtcctgcatcatcctgttcctggtggccaccgccaccggcgtgcactccaacatcgtgctgacccagtcccccgcctccctggccgtgtccctgggccagcgggccaccatctcctgccgggcctccgagtccgtggactcctacggcaactccttcatgcactggtaccagcagaagcccggccagccccccaagctgctgatctacctggcctccaacctggagtccggcgtgcccgcccggttctccggctccggctcccggaccgacttcaccctgaccatcgaccccgtggaggccgacgacgtggccacctactactgccagcagaacaacggcgacccctacaccttcggcggcggcaccaagctggagatcatccggggcggcggcggctccggcggcggcggctccggcggcggcggctccatgggctggtcctgcatcatcctgttcctggtggccaccgccaccggcgtgcactccgaggtgcagctggtggagtccggcggcggcctgatgcagcccaagggctccctgaagctgtcctgcgccgcctccggcttcaccttcaagacctacgccctgaactgggtgcggcaggcccccggcaccggcctggagtgggtggcccggatccggtccaagtccaacaactacaccacctactacgccgactccgtgaaggaccggttcaccatctcccgggacgactcccagaacatgctgtacctgcagatgaacaacctgaagaccgaggacaccgccatgtactactgcgtgcggccccagtccggcacctccttcgcctactggggccagggcaccctggtgaccgtgtccgccgccaccacgacgccagcgccgcgaccaccaacaccggcgcccaccatcgcgtcgcagcccctgtccctgcgcccagaggcgtgccggccagcggcggggggcgcagtgcacacgagggggctggacttcgcctgtgatatctacatctgggcgcccttggccgggacttgtggggtccttctcctgtcactggttatcaccaaacggggcagaaagaaactcctgtatatattcaaacaaccatttatgagaccagtacaaactactcaagaggaagatggctgtagctgccgatttccagaagaagaagaaggaggatgtgaactgagagtgaagttcagcaggagcgcagacgcccccgcgtacaagcagggccagaaccagctctataacgagctcaatctaggacgaagagaggagtacgatgttttggacaagaggcgtggccgggaccctgagatggggggaaagccgagaaggaagaaccctcaggaaggcctgtacaatgaactgcagaaagataagatggcggaggcctacagtgagattgggatgaaaggcgagcgccggaggggcaaggggcacgatggcctttaccagggtctcagtacagccaccaaggacacctacgacgcccttcacatgcaggccctgccccctcgctaa

SEQ ID NO: 244 - DNA, 3518 bp, Artificial Sequence
  Synthesized
atggccttaccagtgaccgccttgctcctgccgctggccttgctgctccacgccgccaggccggatattgtgatgacccagtccccgtcctccctgaccgtgaccgcgggcgaaaaagtgaccatgatttgcaaatcctcccagtccctgctgaattccggcgatcagaaaaattatctgacctggtatcagcagaaaccgggccagccgccgaaactgctgattttttgggcgtccacccgtgaatccggcgtgccggatcgttttaccggctccggctccggcaccgattttaccctgaccatttcctccgtgcaggcggaagatctggcggtgtattattgccagaatgattattcctatccgctgacctttggcgcgggcaccaaactggaactgaaaggcggcggcggctccggcggcggcggctccggcggcggcggctcccaggtgcagctgcagcagtccgatgcggaactggtgaaaccgggctcctccgtgaaaatttcctgcaaagcgtccggctatacctttaccgatcatgcgattcattgggtgaaacagaaaccggaacagggcctggaatggattggccatttttccccgggcaataccgatattaaatataatgataaatttaaaggcaaagcgaccctgaccgtggatcgttcctcctccaccgcgtatatgcagctgaattccctgacctccgaagattccgcggtgtatttttgcaaaacctccacctttttttttgattattggggccagggcaccaccctgaccgtgtcctccaccacgacgccagcgccgcgaccaccaacaccggcgcccaccatcgcgtcgcagcccctgtccctgcgcccagaggcgtgccggccagcggcggggggcgcagtgcacacgagggggctggacttcgcctgtgatatctacatctgggcgcccttggccgggacttgtggggtccttctcctgtcactggttatcaccctttactgcaaacggggcagaaagaaactcctgtatatattcaaacaaccatttatgagaccagtacaaactactcaagaggaagatggctgtagctgccgatttccagaagaagaagaaggaggatgtgaactgagagtgaagttcagcaggagcgcagacgcccccgcgtacaagcagggccagaaccagctctataacgagctcaatctaggacgaagagaggagtacgatgttttggacaagaggcgtggccgggaccctgagatggggggaaagccgagaaggaagaaccctcaggaaggcctgtacaatgaactgcagaaagataagatggcggaggcctacagtgagattgggatgaaaggcgagcgccggaggggcaaggggcacgatggcctttaccagggtctcagtacagccaccaaggacacctacgacgcccttcacatgcaggccctgccccctcgctaatctagaggcgcgcccctctccctcccccccccctaacgttactggccgaagccgcttggaataaggccggtgtgcgtttgtctatatgttattttccaccatattgccgtcttttggcaatgtgagggcccggaaacctggccctgtcttcttgacgagcattcctaggggtctttcccctctcgccaaaggaatgcaaggtctgttgaatgtcgtgaaggaagcagttcctctggaagcttcttgaagacaaacaacgtctgtagcgaccctttgcaggcagcggaaccccccacctggcgacaggtgcctctgcggccaaaagccacgtgtataagatacacctgcaaaggcggcacaaccccagtgccacgttgtgagttggatagttgtggaaagagtcaaatggctctcctcaagcgtattcaacaaggggctgaaggatgcccagaaggtaccccattgtatgggatctgatctggggcctcggtacacatgctttacatgtgtttagtcgaggttaaaaaaacgtctaggccccccgaaccacggggacgtggttttcctttgaaaaacacgatgataatatggccacaacccatatgatggccttaccagtgaccgccttgctcctgccgctggccttgctgctccacgccgccaggccggacatccagctcacccagtccccgagctcgctgtccgcctccgtgggagatcgggtcaccatcacgtgccgcgccagccagtcgatttcctcctacctgaactggtaccaacagaagcccggaaaagccccgaagcttctcatctacgccgcctcgagcctgcagtcaggagtgccctcacggttctccggctccggttccggtactgatttcaccctgaccatttcctccctgcaaccggaggacttcgctacttactactgccagcagtcgtactccaccccctacactttcggacaaggcaccaaggtcgaaatcaagggtggcggtggctcgggcggtggtgggtcgggtggcggcggatctgaagtgcaattggtggaatcagggggaggacttgtgcagcctggaggatcgctgagactgtcatgtgccgtgtccggctttgccctgtccaaccacgggatgtcctgggtccgccgcgcgcctggaaagggcctcgaatgggtgtcgggtattgtgtacagcggtagcacctactatgccgcatccgtgaaggggagattcaccatcagccgggacaactccaggaacactctgtacctccaaatgaattcgctgaggccagaggacactgccatctactactgctccgcgcatggcggagagtccgacgtctggggacaggggaccaccgtgaccgtgtctagcaccacgacgccagcgccgcgaccaccaacaccggcgcccaccatcgcgtcgcagcccctgtccctgcgcccagaggcgtgccggccagcggcggggggcgcagtgcacacgagggggctggacttcgcctgtgatatctacatctgggcgcccttggccgggacttgtggggtccttctcctgtcactggttatcaccctttactgcaaacggggcagaaagaaactcctgtatatattcaaacaaccatttatgagaccagtacaaactactcaagaggaagatggctgtagctgccgatttccagaagaagaagaaggaggatgtgaactgagagtgaagttcagcaggagcgcagacgcccccgcgtacaagcagggccagaaccagctctataacgagctcaatctaggacgaagagaggagtacgatgttttggacaagaggcgtggccgggaccctgagatggggggaaagccgagaaggaagaaccctcaggaaggcctgtacaatgaactgcagaaagataagatggcggaggcctacagtgagattgggatgaaaggcgagcgccggaggggcaaggggcacgatggcctttaccagggtctcagtacagccaccaaggacacctacgacgcccttcacatgcaggccctgccccctcgctaa

SEQ ID NO: 245 - protein, 482 aa, Artificial Sequence
  Synthesized
MALPVTALLLPLALLLHAARPEIVLTQSPGTLSLSPGERATLSCRGGQSVSSSYLAWYQQKPGQAPRLLMYDASIRATGIPDRFSGSGSGTDFTLTISRLEPEDFAVYYCQQYQSWPLTFGQGTKVEIKGGGGSGGGGSGGGGSEVQLLESGGGLVQPGGSLRLSCAASGFTFSSYAMNWVRQAPGKGLEWVSAILSSGGSTYYADSVKGRFTISRDNSKNTLYLQMNSLRAEDTAVYYCARYWPMDIWGQGTLVTVSSTTTPAPRPPTPAPTIASQPLSLRPEACRPAAGGAVHTRGLDFACDIYIWAPLAGTCGVLLLSLVITLYCKRGRKKLLYIFKQPFMRPVQTTQEEDGCSCRFPEEEEGGCELRVKFSRSADAPAYQQGQNQLYNELNLGRREEYDVLDKRRGRDPEMGGKPRRKNPQEGLYNELQKDKMAEAYSEIGMKGERRRGKGHDGLYQGLSTATKDTYDALHMQALPPR

SEQ ID NO: 246 - DNA, 3509 bp, Artificial Sequence
  Synthesized
atggccttaccagtgaccgccttgctcctgccgctggccttgctgctccacgccgccaggccggatattgtgatgacccagtccccgtcctccctgaccgtgaccgcgggcgaaaaagtgaccatgatttgcaaatcctcccagtccctgctgaattccggcgatcagaaaaattatctgacctggtatcagcagaaaccgggccagccgccgaaactgctgattttttgggcgtccacccgtgaatccggcgtgccggatcgttttaccggctccggctccggcaccgattttaccctgaccatttcctccgtgcaggcggaagatctggcggtgtattattgccagaatgattattcctatccgctgacctttggcgcgggcaccaaactggaactgaaaggcggcggcggctccggcggcggcggctccggcggcggcggctcccaggtgcagctgcagcagtccgatgcggaactggtgaaaccgggctcctccgtgaaaatttcctgcaaagcgtccggctatacctttaccgatcatgcgattcattgggtgaaacagaaaccggaacagggcctggaatggattggccatttttccccgggcaataccgatattaaatataatgataaatttaaaggcaaagcgaccctgaccgtggatcgttcctcctccaccgcgtatatgcagctgaattccctgacctccgaagattccgcggtgtatttttgcaaaacctccacctttttttttgattattggggccagggcaccaccctgaccgtgtcctccaccacgacgccagcgccgcgaccaccaacaccggcgcccaccatcgcgtcgcagcccctgtccctgcgcccagaggcgtgccggccagcggcggggggcgcagtgcacacgagggggctggacttcgcctgtgatatctacatctgggcgcccttggccgggacttgtggggtccttctcctgtcactggttatcaccaaacggggcagaaagaaactcctgtatatattcaaacaaccatttatgagaccagtacaaactactcaagaggaagatggctgtagctgccgatttccagaagaagaagaaggaggatgtgaactgagagtgaagttcagcaggagcgcagacgcccccgcgtacaagcagggccagaaccagctctataacgagctcaatctaggacgaagagaggagtacgatgttttggacaagaggcgtggccgggaccctgagatggggggaaagccgagaaggaagaaccctcaggaaggcctgtacaatgaactgcagaaagataagatggcggaggcctacagtgagattgggatgaaaggcgagcgccggaggggcaaggggcacgatggcctttaccagggtctcagtacagccaccaaggacacctacgacgcccttcacatgcaggccctgccccctcgctaatctagaggcgcgcccctctccctcccccccccctaacgttactggccgaagccgcttggaataaggccggtgtgcgtttgtctatatgttattttccaccatattgccgtcttttggcaatgtgagggcccggaaacctggccctgtcttcttgacgagcattcctaggggtctttcccctctcgccaaaggaatgcaaggtctgttgaatgtcgtgaaggaagcagttcctctggaagcttcttgaagacaaacaacgtctgtagcgaccctttgcaggcagcggaaccccccacctggcgacaggtgcctctgcggccaaaagccacgtgtataagatacacctgcaaaggcggcacaaccccagtgccacgttgtgagttggatagttgtggaaagagtcaaatggctctcctcaagcgtattcaacaaggggctgaaggatgcccagaaggtaccccattgtatgggatctgatctggggcctcggtacacatgctttacatgtgtttagtcgaggttaaaaaaacgtctaggccccccgaaccacggggacgtggttttcctttgaaaaacacgatgataatatggccacaacccatatgatggccttaccagtgaccgccttgctcctgccgctggccttgctgctccacgccgccaggccggacatccagctcacccagtccccgagctcgctgtccgcctccgtgggagatcgggtcaccatcacgtgccgcgccagccagtcgatttcctcctacctgaactggtaccaacagaagcccggaaaagccccgaagcttctcatctacgccgcctcgagcctgcagtcaggagtgccctcacggttctccggctccggttccggtactgatttcaccctgaccatttcctccctgcaaccggaggacttcgctacttactactgccagcagtcgtactccaccccctacactttcggacaaggcaccaaggtcgaaatcaagggtggcggtggctcgggcggtggtgggtcgggtggcggcggatctgaagtgcaattggtggaatcagggggaggacttgtgcagcctggaggatcgctgagactgtcatgtgccgtgtccggctttgccctgtccaaccacgggatgtcctgggtccgccgcgcgcctggaaagggcctcgaatgggtgtcgggtattgtgtacagcggtagcacctactatgccgcatccgtgaaggggagattcaccatcagccgggacaactccaggaacactctgtacctccaaatgaattcgctgaggccagaggacactgccatctactactgctccgcgcatggcggagagtccgacgtctggggacaggggaccaccgtgaccgtgtctagcaccacgacgccagcgccgcgaccaccaacaccggcgcccaccatcgcgtcgcagcccctgtccctgcgcccagaggcgtgccggccagcggcggggggcgcagtgcacacgagggggctggacttcgcctgtgatatctacatctgggcgcccttggccgggacttgtggggtccttctcctgtcactggttatcaccctttactgcaaacggggcagaaagaaactcctgtatatattcaaacaaccatttatgagaccagtacaaactactcaagaggaagatggctgtagctgccgatttccagaagaagaagaaggaggatgtgaactgagagtgaagttcagcaggagcgcagacgcccccgcgtacaagcagggccagaaccagctctataacgagctcaatctaggacgaagagaggagtacgatgttttggacaagaggcgtggccgggaccctgagatggggggaaagccgagaaggaagaaccctcaggaaggcctgtacaatgaactgcagaaagataagatggcggaggcctacagtgagattgggatgaaaggcgagcgccggaggggcaaggggcacgatggcctttaccagggtctcagtacagccaccaaggacacctacgacgcccttcacatgcaggccctgccccctcgctaa

SEQ ID NO: 247 - DNA, 3509 bp, Artificial Sequence
  Synthesized
atggccttaccagtgaccgccttgctcctgccgctggccttgctgctccacgccgccaggccggatattgtgatgacccagtccccgtcctccctgaccgtgaccgcgggcgaaaaagtgaccatgatttgcaaatcctcccagtccctgctgaattccggcgatcagaaaaattatctgacctggtatcagcagaaaccgggccagccgccgaaactgctgattttttgggcgtccacccgtgaatccggcgtgccggatcgttttaccggctccggctccggcaccgattttaccctgaccatttcctccgtgcaggcggaagatctggcggtgtattattgccagaatgattattcctatccgctgacctttggcgcgggcaccaaactggaactgaaaggcggcggcggctccggcggcggcggctccggcggcggcggctcccaggtgcagctgcagcagtccgatgcggaactggtgaaaccgggctcctccgtgaaaatttcctgcaaagcgtccggctatacctttaccgatcatgcgattcattgggtgaaacagaaaccggaacagggcctggaatggattggccatttttccccgggcaataccgatattaaatataatgataaatttaaaggcaaagcgaccctgaccgtggatcgttcctcctccaccgcgtatatgcagctgaattccctgacctccgaagattccgcggtgtatttttgcaaaacctccacctttttttttgattattggggccagggcaccaccctgaccgtgtcctccaccacgacgccagcgccgcgaccaccaacaccggcgcccaccatcgcgtcgcagcccctgtccctgcgcccagaggcgtgccggccagcggcggggggcgcagtgcacacgagggggctggacttcgcctgtgatatctacatctgggcgcccttggccgggacttgtggggtccttctcctgtcactggttatcaccctttactgcaaacggggcagaaagaaactcctgtatatattcaaacaaccatttatgagaccagtacaaactactcaagaggaagatggctgtagctgccgatttccagaagaagaagaaggaggatgtgaactgagagtgaagttcagcaggagcgcagacgcccccgcgtacaagcagggccagaaccagctctataacgagctcaatctaggacgaagagaggagtacgatgttttggacaagaggcgtggccgggaccctgagatggggggaaagccgagaaggaagaaccctcaggaaggcctgtacaatgaactgcagaaagataagatggcggaggcctacagtgagattgggatgaaaggcgagcgccggaggggcaaggggcacgatggcctttaccagggtctcagtacagccaccaaggacacctacgacgcccttcacatgcaggccctgccccctcgctaatctagaggcgcgcccctctccctcccccccccctaacgttactggccgaagccgcttggaataaggccggtgtgcgtttgtctatatgttattttccaccatattgccgtcttttggcaatgtgagggcccggaaacctggccctgtcttcttgacgagcattcctaggggtctttcccctctcgccaaaggaatgcaaggtctgttgaatgtcgtgaaggaagcagttcctctggaagcttcttgaagacaaacaacgtctgtagcgaccctttgcaggcagcggaaccccccacctggcgacaggtgcctctgcggccaaaagccacgtgtataagatacacctgcaaaggcggcacaaccccagtgccacgttgtgagttggatagttgtggaaagagtcaaatggctctcctcaagcgtattcaacaaggggctgaaggatgcccagaaggtaccccattgtatgggatctgatctggggcctcggtacacatgctttacatgtgtttagtcgaggttaaaaaaacgtctaggccccccgaaccacggggacgtggttttcctttgaaaaacacgatgataatatggccacaacccatatgatggccttaccagtgaccgccttgctcctgccgctggccttgctgctccacgccgccaggccggacatccagctcacccagtccccgagctcgctgtccgcctccgtgggagatcgggtcaccatcacgtgccgcgccagccagtcgatttcctcctacctgaactggtaccaacagaagcccggaaaagccccgaagcttctcatctacgccgcctcgagcctgcagtcaggagtgccctcacggttctccggctccggttccggtactgatttcaccctgaccatttcctccctgcaaccggaggacttcgctacttactactgccagcagtcgtactccaccccctacactttcggacaaggcaccaaggtcgaaatcaagggtggcggtggctcgggcggtggtgggtcgggtggcggcggatctgaagtgcaattggtggaatcagggggaggacttgtgcagcctggaggatcgctgagactgtcatgtgccgtgtccggctttgccctgtccaaccacgggatgtcctgggtccgccgcgcgcctggaaagggcctcgaatgggtgtcgggtattgtgtacagcggtagcacctactatgccgcatccgtgaaggggagattcaccatcagccgggacaactccaggaacactctgtacctccaaatgaattcgctgaggccagaggacactgccatctactactgctccgcgcatggcggagagtccgacgtctggggacaggggaccaccgtgaccgtgtctagcaccacgacgccagcgccgcgaccaccaacaccggcgcccaccatcgcgtcgcagcccctgtccctgcgcccagaggcgtgccggccagcggcggggggcgcagtgcacacgagggggctggacttcgcctgtgatatctacatctgggcgcccttggccgggacttgtggggtccttctcctgtcactggttatcaccaaacggggcagaaagaaactcctgtatatattcaaacaaccatttatgagaccagtacaaactactcaagaggaagatggctgtagctgccgatttccagaagaagaagaaggaggatgtgaactgagagtgaagttcagcaggagcgcagacgcccccgcgtacaagcagggccagaaccagctctataacgagctcaatctaggacgaagagaggagtacgatgttttggacaagaggcgtggccgggaccctgagatggggggaaagccgagaaggaagaaccctcaggaaggcctgtacaatgaactgcagaaagataagatggcggaggcctacagtgagattgggatgaaaggcgagcgccggaggggcaaggggcacgatggcctttaccagggtctcagtacagccaccaaggacacctacgacgcccttcacatgcaggccctgccccctcgctaa

SEQ ID NO: 248 - protein, 479 aa, Artificial Sequence
  Synthesized
MALPVTALLLPLALLLHAARPEIVLTQSPGTLSLSPGERATLSCRGGQSVSSSYLAWYQQKPGQAPRLLMYDASIRATGIPDRFSGSGSGTDFTLTISRLEPEDFAVYYCQQYQSWPLTFGQGTKVEIKGGGGSGGGGSGGGGSEVQLLESGGGLVQPGGSLRLSCAASGFTFSSYAMNWVRQAPGKGLEWVSAILSSGGSTYYADSVKGRFTISRDNSKNTLYLQMNSLRAEDTAVYYCARYWPMDIWGQGTLVTVSSTTTPAPRPPTPAPTIASQPLSLRPEACRPAAGGAVHTRGLDFACDIYIWAPLAGTCGVLLLSLVITKRGRKKLLYIFKQPFMRPVQTTQEEDGCSCRFPEEEEGGCELRVKFSRSADAPAYQQGQNQLYNELNLGRREEYDVLDKRRGRDPEMGGKPRRKNPQEGLYNELQKDKMAEAYSEIGMKGERRRGKGHDGLYQGLSTATKDTYDALHMQALPPR

SEQ ID NO: 249 - DNA, 3500 bp, Artificial Sequence
  Synthesized
atggccttaccagtgaccgccttgctcctgccgctggccttgctgctccacgccgccaggccggatattgtgatgacccagtccccgtcctccctgaccgtgaccgcgggcgaaaaagtgaccatgatttgcaaatcctcccagtccctgctgaattccggcgatcagaaaaattatctgacctggtatcagcagaaaccgggccagccgccgaaactgctgattttttgggcgtccacccgtgaatccggcgtgccggatcgttttaccggctccggctccggcaccgattttaccctgaccatttcctccgtgcaggcggaagatctggcggtgtattattgccagaatgattattcctatccgctgacctttggcgcgggcaccaaactggaactgaaaggcggcggcggctccggcggcggcggctccggcggcggcggctcccaggtgcagctgcagcagtccgatgcggaactggtgaaaccgggctcctccgtgaaaatttcctgcaaagcgtccggctatacctttaccgatcatgcgattcattgggtgaaacagaaaccggaacagggcctggaatggattggccatttttccccgggcaataccgatattaaatataatgataaatttaaaggcaaagcgaccctgaccgtggatcgttcctcctccaccgcgtatatgcagctgaattccctgacctccgaagattccgcggtgtatttttgcaaaacctccacctttttttttgattattggggccagggcaccaccctgaccgtgtcctccaccacgacgccagcgccgcgaccaccaacaccggcgcccaccatcgcgtcgcagcccctgtccctgcgcccagaggcgtgccggccagcggcggggggcgcagtgcacacgagggggctggacttcgcctgtgatatctacatctgggcgcccttggccgggacttgtggggtccttctcctgtcactggttatcaccaaacggggcagaaagaaactcctgtatatattcaaacaaccatttatgagaccagtacaaactactcaagaggaagatggctgtagctgccgatttccagaagaagaagaaggaggatgtgaactgagagtgaagttcagcaggagcgcagacgcccccgcgtacaagcagggccagaaccagctctataacgagctcaatctaggacgaagagaggagtacgatgttttggacaagaggcgtggccgggaccctgagatggggggaaagccgagaaggaagaaccctcaggaaggcctgtacaatgaactgcagaaagataagatggcggaggcctacagtgagattgggatgaaaggcgagcgccggaggggcaaggggcacgatggcctttaccagggtctcagtacagccaccaaggacacctacgacgcccttcacatgcaggccctgccccctcgctaatctagaggcgcgcccctctccctcccccccccctaacgttactggccgaagccgcttggaataaggccggtgtgcgtttgtctatatgttattttccaccatattgccgtcttttggcaatgtgagggcccggaaacctggccctgtcttcttgacgagcattcctaggggtctttcccctctcgccaaaggaatgcaaggtctgttgaatgtcgtgaaggaagcagttcctctggaagcttcttgaagacaaacaacgtctgtagcgaccctttgcaggcagcggaaccccccacctggcgacaggtgcctctgcggccaaaagccacgtgtataagatacacctgcaaaggcggcacaaccccagtgccacgttgtgagttggatagttgtggaaagagtcaaatggctctcctcaagcgtattcaacaaggggctgaaggatgcccagaaggtaccccattgtatgggatctgatctggggcctcggtacacatgctttacatgtgtttagtcgaggttaaaaaaacgtctaggccccccgaaccacggggacgtggttttcctttgaaaaacacgatgataatatggccacaacccatatgatggccttaccagtgaccgccttgctcctgccgctggccttgctgctccacgccgccaggccggacatccagctcacccagtccccgagctcgctgtccgcctccgtgggagatcgggtcaccatcacgtgccgcgccagccagtcgatttcctcctacctgaactggtaccaacagaagcccggaaaagccccgaagcttctcatctacgccgcctcgagcctgcagtcaggagtgccctcacggttctccggctccggttccggtactgatttcaccctgaccatttcctccctgcaaccggaggacttcgctacttactactgccagcagtcgtactccaccccctacactttcggacaaggcaccaaggtcgaaatcaagggtggcggtggctcgggcggtggtgggtcgggtggcggcggatctgaagtgcaattggtggaatcagggggaggacttgtgcagcctggaggatcgctgagactgtcatgtgccgtgtccggctttgccctgtccaaccacgggatgtcctgggtccgccgcgcgcctggaaagggcctcgaatgggtgtcgggtattgtgtacagcggtagcacctactatgccgcatccgtgaaggggagattcaccatcagccgggacaactccaggaacactctgtacctccaaatgaattcgctgaggccagaggacactgccatctactactgctccgcgcatggcggagagtccgacgtctggggacaggggaccaccgtgaccgtgtctagcaccacgacgccagcgccgcgaccaccaacaccggcgcccaccatcgcgtcgcagcccctgtccctgcgcccagaggcgtgccggccagcggcggggggcgcagtgcacacgagggggctggacttcgcctgtgatatctacatctgggcgcccttggccgggacttgtggggtccttctcctgtcactggttatcaccaaacggggcagaaagaaactcctgtatatattcaaacaaccatttatgagaccagtacaaactactcaagaggaagatggctgtagctgccgatttccagaagaagaagaaggaggatgtgaactgagagtgaagttcagcaggagcgcagacgcccccgcgtacaagcagggccagaaccagctctataacgagctcaatctaggacgaagagaggagtacgatgttttggacaagaggcgtggccgggaccctgagatggggggaaagccgagaaggaagaaccctcaggaaggcctgtacaatgaactgcagaaagataagatggcggaggcctacagtgagattgggatgaaaggcgagcgccggaggggcaaggggcacgatggcctttaccagggtctcagtacagccaccaaggacacctacgacgcccttcacatgcaggccctgccccctcgctaa

SEQ ID NO: 250 - DNA, 3518 bp, Artificial Sequence
  Synthesized
atggccttaccagtgaccgccttgctcctgccgctggccttgctgctccacgccgccaggccggacatcgtgatgacccagtccccctccagcctgacagtgacagccggcgagaaggtgacaatgatctgtaagtccagccagagcctgctgaacagcggcgaccagaagaactacctgacctggtaccagcagaagcctggccagccccccaagctgctgatcttctgggccagcacaagggagagcggcgtgcccgacagattcacaggcagcggcagcggcaccgacttcacactgaccatttcctccgtgcaggccgaggacctcgccgtgtactactgccagaacgactactcctaccccctgacattcggcgccggcaccaaactggagctgaagggtggcggtggctcgggcggtggtgggtcgggtggcggcggatctcaggtgcagctccagcagtccgatgccgagctggtgaagcccggaagcagcgtcaagatcagctgtaaggcctccggctacaccttcacagaccacgccatccactgggtgaagcagaagcccgagcagggcctggagtggatcggccactttagccccggaaacaccgacatcaagtacaacgacaagttcaagggcaaggccaccctgaccgtggacaggagcagcagcaccgcctacatgcagctgaacagcctgacaagcgaggacagcgccgtgtacttctgcaagacctccaccttcttcttcgactactggggccagggaaccaccctgacagtgtccagcaccacgacgccagcgccgcgaccaccaacaccggcgcccaccatcgcgtcgcagcccctgtccctgcgcccagaggcgtgccggccagcggcggggggcgcagtgcacacgagggggctggacttcgcctgtgatatctacatctgggcgcccttggccgggacttgtggggtccttctcctgtcactggttatcaccctttactgcaaacggggcagaaagaaactcctgtatatattcaaacaaccatttatgagaccagtacaaactactcaagaggaagatggctgtagctgccgatttccagaagaagaagaaggaggatgtgaactgagagtgaagttcagcaggagcgcagacgcccccgcgtacaagcagggccagaaccagctctataacgagctcaatctaggacgaagagaggagtacgatgttttggacaagaggcgtggccgggaccctgagatggggggaaagccgagaaggaagaaccctcaggaaggcctgtacaatgaactgcagaaagataagatggcggaggcctacagtgagattgggatgaaaggcgagcgccggaggggcaaggggcacgatggcctttaccagggtctcagtacagccaccaaggacacctacgacgcccttcacatgcaggccctgccccctcgctaatctagaggcgcgcccctctccctcccccccccctaacgttactggccgaagccgcttggaataaggccggtgtgcgtttgtctatatgttattttccaccatattgccgtcttttggcaatgtgagggcccggaaacctggccctgtcttcttgacgagcattcctaggggtctttcccctctcgccaaaggaatgcaaggtctgttgaatgtcgtgaaggaagcagttcctctggaagcttcttgaagacaaacaacgtctgtagcgaccctttgcaggcagcggaaccccccacctggcgacaggtgcctctgcggccaaaagccacgtgtataagatacacctgcaaaggcggcacaaccccagtgccacgttgtgagttggatagttgtggaaagagtcaaatggctctcctcaagcgtattcaacaaggggctgaaggatgcccagaaggtaccccattgtatgggatctgatctggggcctcggtacacatgctttacatgtgtttagtcgaggttaaaaaaacgtctaggccccccgaaccacggggacgtggttttcctttgaaaaacacgatgataatatggccacaacccatatgatggccttaccagtgaccgccttgctcctgccgctggccttgctgctccacgccgccaggccggacatccagctcacccagtccccgagctcgctgtccgcctccgtgggagatcgggtcaccatcacgtgccgcgccagccagtcgatttcctcctacctgaactggtaccaacagaagcccggaaaagccccgaagcttctcatctacgccgcctcgagcctgcagtcaggagtgccctcacggttctccggctccggttccggtactgatttcaccctgaccatttcctccctgcaaccggaggacttcgctacttactactgccagcagtcgtactccaccccctacactttcggacaaggcaccaaggtcgaaatcaagggtggcggtggctcgggcggtggtgggtcgggtggcggcggatctgaagtgcaattggtggaatcagggggaggacttgtgcagcctggaggatcgctgagactgtcatgtgccgtgtccggctttgccctgtccaaccacgggatgtcctgggtccgccgcgcgcctggaaagggcctcgaatgggtgtcgggtattgtgtacagcggtagcacctactatgccgcatccgtgaaggggagattcaccatcagccgggacaactccaggaacactctgtacctccaaatgaattcgctgaggccagaggacactgccatctactactgctccgcgcatggcggagagtccgacgtctggggacaggggaccaccgtgaccgtgtctagcaccacgacgccagcgccgcgaccaccaacaccggcgcccaccatcgcgtcgcagcccctgtccctgcgcccagaggcgtgccggccagcggcggggggcgcagtgcacacgagggggctggacttcgcctgtgatatctacatctgggcgcccttggccgggacttgtggggtccttctcctgtcactggttatcaccctttactgcaaacggggcagaaagaaactcctgtatatattcaaacaaccatttatgagaccagtacaaactactcaagaggaagatggctgtagctgccgatttccagaagaagaagaaggaggatgtgaactgagagtgaagttcagcaggagcgcagacgcccccgcgtacaagcagggccagaaccagctctataacgagctcaatctaggacgaagagaggagtacgatgttttggacaagaggcgtggccgggaccctgagatggggggaaagccgagaaggaagaaccctcaggaaggcctgtacaatgaactgcagaaagataagatggcggaggcctacagtgagattgggatgaaaggcgagcgccggaggggcaaggggcacgatggcctttaccagggtctcagtacagccaccaaggacacctacgacgcccttcacatgcaggccctgccccctcgctaa

SEQ ID NO: 251 - DNA, 3509 bp, Artificial Sequence
  Synthesized
atggccttaccagtgaccgccttgctcctgccgctggccttgctgctccacgccgccaggccggacatcgtgatgacccagtccccctccagcctgacagtgacagccggcgagaaggtgacaatgatctgtaagtccagccagagcctgctgaacagcggcgaccagaagaactacctgacctggtaccagcagaagcctggccagccccccaagctgctgatcttctgggccagcacaagggagagcggcgtgcccgacagattcacaggcagcggcagcggcaccgacttcacactgaccatttcctccgtgcaggccgaggacctcgccgtgtactactgccagaacgactactcctaccccctgacattcggcgccggcaccaaactggagctgaagggtggcggtggctcgggcggtggtgggtcgggtggcggcggatctcaggtgcagctccagcagtccgatgccgagctggtgaagcccggaagcagcgtcaagatcagctgtaaggcctccggctacaccttcacagaccacgccatccactgggtgaagcagaagcccgagcagggcctggagtggatcggccactttagccccggaaacaccgacatcaagtacaacgacaagttcaagggcaaggccaccctgaccgtggacaggagcagcagcaccgcctacatgcagctgaacagcctgacaagcgaggacagcgccgtgtacttctgcaagacctccaccttcttcttcgactactggggccagggaaccaccctgacagtgtccagcaccacgacgccagcgccgcgaccaccaacaccggcgcccaccatcgcgtcgcagcccctgtccctgcgcccagaggcgtgccggccagcggcggggggcgcagtgcacacgagggggctggacttcgcctgtgatatctacatctgggcgcccttggccgggacttgtggggtccttctcctgtcactggttatcaccaaacggggcagaaagaaactcctgtatatattcaaacaaccatttatgagaccagtacaaactactcaagaggaagatggctgtagctgccgatttccagaagaagaagaaggaggatgtgaactgagagtgaagttcagcaggagcgcagacgcccccgcgtacaagcagggccagaaccagctctataacgagctcaatctaggacgaagagaggagtacgatgttttggacaagaggcgtggccgggaccctgagatggggggaaagccgagaaggaagaaccctcaggaaggcctgtacaatgaactgcagaaagataagatggcggaggcctacagtgagattgggatgaaaggcgagcgccggaggggcaaggggcacgatggcctttaccagggtctcagtacagccaccaaggacacctacgacgcccttcacatgcaggccctgccccctcgctaatctagaggcgcgcccctctccctcccccccccctaacgttactggccgaagccgcttggaataaggccggtgtgcgtttgtctatatgttattttccaccatattgccgtcttttggcaatgtgagggcccggaaacctggccctgtcttcttgacgagcattcctaggggtctttcccctctcgccaaaggaatgcaaggtctgttgaatgtcgtgaaggaagcagttcctctggaagcttcttgaagacaaacaacgtctgtagcgaccctttgcaggcagcggaaccccccacctggcgacaggtgcctctgcggccaaaagccacgtgtataagatacacctgcaaaggcggcacaaccccagtgccacgttgtgagttggatagttgtggaaagagtcaaatggctctcctcaagcgtattcaacaaggggctgaaggatgcccagaaggtaccccattgtatgggatctgatctggggcctcggtacacatgctttacatgtgtttagtcgaggttaaaaaaacgtctaggccccccgaaccacggggacgtggttttcctttgaaaaacacgatgataatatggccacaacccatatgatggccttaccagtgaccgccttgctcctgccgctggccttgctgctccacgccgccaggccggacatccagctcacccagtccccgagctcgctgtccgcctccgtgggagatcgggtcaccatcacgtgccgcgccagccagtcgatttcctcctacctgaactggtaccaacagaagcccggaaaagccccgaagcttctcatctacgccgcctcgagcctgcagtcaggagtgccctcacggttctccggctccggttccggtactgatttcaccctgaccatttcctccctgcaaccggaggacttcgctacttactactgccagcagtcgtactccaccccctacactttcggacaaggcaccaaggtcgaaatcaagggtggcggtggctcgggcggtggtgggtcgggtggcggcggatctgaagtgcaattggtggaatcagggggaggacttgtgcagcctggaggatcgctgagactgtcatgtgccgtgtccggctttgccctgtccaaccacgggatgtcctgggtccgccgcgcgcctggaaagggcctcgaatgggtgtcgggtattgtgtacagcggtagcacctactatgccgcatccgtgaaggggagattcaccatcagccgggacaactccaggaacactctgtacctccaaatgaattcgctgaggccagaggacactgccatctactactgctccgcgcatggcggagagtccgacgtctggggacaggggaccaccgtgaccgtgtctagcaccacgacgccagcgccgcgaccaccaacaccggcgcccaccatcgcgtcgcagcccctgtccctgcgcccagaggcgtgccggccagcggcggggggcgcagtgcacacgagggggctggacttcgcctgtgatatctacatctgggcgcccttggccgggacttgtggggtccttctcctgtcactggttatcaccctttactgcaaacggggcagaaagaaactcctgtatatattcaaacaaccatttatgagaccagtacaaactactcaagaggaagatggctgtagctgccgatttccagaagaagaagaaggaggatgtgaactgagagtgaagttcagcaggagcgcagacgcccccgcgtacaagcagggccagaaccagctctataacgagctcaatctaggacgaagagaggagtacgatgttttggacaagaggcgtggccgggaccctgagatggggggaaagccgagaaggaagaaccctcaggaaggcctgtacaatgaactgcagaaagataagatggcggaggcctacagtgagattgggatgaaaggcgagcgccggaggggcaaggggcacgatggcctttaccagggtctcagtacagccaccaaggacacctacgacgcccttcacatgcaggccctgccccctcgctaa

SEQ ID NO: 252 - DNA, 3509 bp, Artificial Sequence
  Synthesized
atggccttaccagtgaccgccttgctcctgccgctggccttgctgctccacgccgccaggccggacatcgtgatgacccagtccccctccagcctgacagtgacagccggcgagaaggtgacaatgatctgtaagtccagccagagcctgctgaacagcggcgaccagaagaactacctgacctggtaccagcagaagcctggccagccccccaagctgctgatcttctgggccagcacaagggagagcggcgtgcccgacagattcacaggcagcggcagcggcaccgacttcacactgaccatttcctccgtgcaggccgaggacctcgccgtgtactactgccagaacgactactcctaccccctgacattcggcgccggcaccaaactggagctgaagggtggcggtggctcgggcggtggtgggtcgggtggcggcggatctcaggtgcagctccagcagtccgatgccgagctggtgaagcccggaagcagcgtcaagatcagctgtaaggcctccggctacaccttcacagaccacgccatccactgggtgaagcagaagcccgagcagggcctggagtggatcggccactttagccccggaaacaccgacatcaagtacaacgacaagttcaagggcaaggccaccctgaccgtggacaggagcagcagcaccgcctacatgcagctgaacagcctgacaagcgaggacagcgccgtgtacttctgcaagacctccaccttcttcttcgactactggggccagggaaccaccctgacagtgtccagcaccacgacgccagcgccgcgaccaccaacaccggcgcccaccatcgcgtcgcagcccctgtccctgcgcccagaggcgtgccggccagcggcggggggcgcagtgcacacgagggggctggacttcgcctgtgatatctacatctgggcgcccttggccgggacttgtggggtccttctcctgtcactggttatcaccctttactgcaaacggggcagaaagaaactcctgtatatattcaaacaaccatttatgagaccagtacaaactactcaagaggaagatggctgtagctgccgatttccagaagaagaagaaggaggatgtgaactgagagtgaagttcagcaggagcgcagacgcccccgcgtacaagcagggccagaaccagctctataacgagctcaatctaggacgaagagaggagtacgatgttttggacaagaggcgtggccgggaccctgagatggggggaaagccgagaaggaagaaccctcaggaaggcctgtacaatgaactgcagaaagataagatggcggaggcctacagtgagattgggatgaaaggcgagcgccggaggggcaaggggcacgatggcctttaccagggtctcagtacagccaccaaggacacctacgacgcccttcacatgcaggccctgccccctcgctaatctagaggcgcgcccctctccctcccccccccctaacgttactggccgaagccgcttggaataaggccggtgtgcgtttgtctatatgttattttccaccatattgccgtcttttggcaatgtgagggcccggaaacctggccctgtcttcttgacgagcattcctaggggtctttcccctctcgccaaaggaatgcaaggtctgttgaatgtcgtgaaggaagcagttcctctggaagcttcttgaagacaaacaacgtctgtagcgaccctttgcaggcagcggaaccccccacctggcgacaggtgcctctgcggccaaaagccacgtgtataagatacacctgcaaaggcggcacaaccccagtgccacgttgtgagttggatagttgtggaaagagtcaaatggctctcctcaagcgtattcaacaaggggctgaaggatgcccagaaggtaccccattgtatgggatctgatctggggcctcggtacacatgctttacatgtgtttagtcgaggttaaaaaaacgtctaggccccccgaaccacggggacgtggttttcctttgaaaaacacgatgataatatggccacaacccatatgatggccttaccagtgaccgccttgctcctgccgctggccttgctgctccacgccgccaggccggacatccagctcacccagtccccgagctcgctgtccgcctccgtgggagatcgggtcaccatcacgtgccgcgccagccagtcgatttcctcctacctgaactggtaccaacagaagcccggaaaagccccgaagcttctcatctacgccgcctcgagcctgcagtcaggagtgccctcacggttctccggctccggttccggtactgatttcaccctgaccatttcctccctgcaaccggaggacttcgctacttactactgccagcagtcgtactccaccccctacactttcggacaaggcaccaaggtcgaaatcaagggtggcggtggctcgggcggtggtgggtcgggtggcggcggatctgaagtgcaattggtggaatcagggggaggacttgtgcagcctggaggatcgctgagactgtcatgtgccgtgtccggctttgccctgtccaaccacgggatgtcctgggtccgccgcgcgcctggaaagggcctcgaatgggtgtcgggtattgtgtacagcggtagcacctactatgccgcatccgtgaaggggagattcaccatcagccgggacaactccaggaacactctgtacctccaaatgaattcgctgaggccagaggacactgccatctactactgctccgcgcatggcggagagtccgacgtctggggacaggggaccaccgtgaccgtgtctagcaccacgacgccagcgccgcgaccaccaacaccggcgcccaccatcgcgtcgcagcccctgtccctgcgcccagaggcgtgccggccagcggcggggggcgcagtgcacacgagggggctggacttcgcctgtgatatctacatctgggcgcccttggccgggacttgtggggtccttctcctgtcactggttatcaccaaacggggcagaaagaaactcctgtatatattcaaacaaccatttatgagaccagtacaaactactcaagaggaagatggctgtagctgccgatttccagaagaagaagaaggaggatgtgaactgagagtgaagttcagcaggagcgcagacgcccccgcgtacaagcagggccagaaccagctctataacgagctcaatctaggacgaagagaggagtacgatgttttggacaagaggcgtggccgggaccctgagatggggggaaagccgagaaggaagaaccctcaggaaggcctgtacaatgaactgcagaaagataagatggcggaggcctacagtgagattgggatgaaaggcgagcgccggaggggcaaggggcacgatggcctttaccagggtctcagtacagccaccaaggacacctacgacgcccttcacatgcaggccctgccccctcgctaa

SEQ ID NO: 253 - DNA, 3500 bp, Artificial Sequence
  Synthesized
atggccttaccagtgaccgccttgctcctgccgctggccttgctgctccacgccgccaggccggacatcgtgatgacccagtccccctccagcctgacagtgacagccggcgagaaggtgacaatgatctgtaagtccagccagagcctgctgaacagcggcgaccagaagaactacctgacctggtaccagcagaagcctggccagccccccaagctgctgatcttctgggccagcacaagggagagcggcgtgcccgacagattcacaggcagcggcagcggcaccgacttcacactgaccatttcctccgtgcaggccgaggacctcgccgtgtactactgccagaacgactactcctaccccctgacattcggcgccggcaccaaactggagctgaagggtggcggtggctcgggcggtggtgggtcgggtggcggcggatctcaggtgcagctccagcagtccgatgccgagctggtgaagcccggaagcagcgtcaagatcagctgtaaggcctccggctacaccttcacagaccacgccatccactgggtgaagcagaagcccgagcagggcctggagtggatcggccactttagccccggaaacaccgacatcaagtacaacgacaagttcaagggcaaggccaccctgaccgtggacaggagcagcagcaccgcctacatgcagctgaacagcctgacaagcgaggacagcgccgtgtacttctgcaagacctccaccttcttcttcgactactggggccagggaaccaccctgacagtgtccagcaccacgacgccagcgccgcgaccaccaacaccggcgcccaccatcgcgtcgcagcccctgtccctgcgcccagaggcgtgccggccagcggcggggggcgcagtgcacacgagggggctggacttcgcctgtgatatctacatctgggcgcccttggccgggacttgtggggtccttctcctgtcactggttatcaccaaacggggcagaaagaaactcctgtatatattcaaacaaccatttatgagaccagtacaaactactcaagaggaagatggctgtagctgccgatttccagaagaagaagaaggaggatgtgaactgagagtgaagttcagcaggagcgcagacgcccccgcgtacaagcagggccagaaccagctctataacgagctcaatctaggacgaagagaggagtacgatgttttggacaagaggcgtggccgggaccctgagatggggggaaagccgagaaggaagaaccctcaggaaggcctgtacaatgaactgcagaaagataagatggcggaggcctacagtgagattgggatgaaaggcgagcgccggaggggcaaggggcacgatggcctttaccagggtctcagtacagccaccaaggacacctacgacgcccttcacatgcaggccctgccccctcgctaatctagaggcgcgcccctctccctcccccccccctaacgttactggccgaagccgcttggaataaggccggtgtgcgtttgtctatatgttattttccaccatattgccgtcttttggcaatgtgagggcccggaaacctggccctgtcttcttgacgagcattcctaggggtctttcccctctcgccaaaggaatgcaaggtctgttgaatgtcgtgaaggaagcagttcctctggaagcttcttgaagacaaacaacgtctgtagcgaccctttgcaggcagcggaaccccccacctggcgacaggtgcctctgcggccaaaagccacgtgtataagatacacctgcaaaggcggcacaaccccagtgccacgttgtgagttggatagttgtggaaagagtcaaatggctctcctcaagcgtattcaacaaggggctgaaggatgcccagaaggtaccccattgtatgggatctgatctggggcctcggtacacatgctttacatgtgtttagtcgaggttaaaaaaacgtctaggccccccgaaccacggggacgtggttttcctttgaaaaacacgatgataatatggccacaacccatatgatggccttaccagtgaccgccttgctcctgccgctggccttgctgctccacgccgccaggccggacatccagctcacccagtccccgagctcgctgtccgcctccgtgggagatcgggtcaccatcacgtgccgcgccagccagtcgatttcctcctacctgaactggtaccaacagaagcccggaaaagccccgaagcttctcatctacgccgcctcgagcctgcagtcaggagtgccctcacggttctccggctccggttccggtactgatttcaccctgaccatttcctccctgcaaccggaggacttcgctacttactactgccagcagtcgtactccaccccctacactttcggacaaggcaccaaggtcgaaatcaagggtggcggtggctcgggcggtggtgggtcgggtggcggcggatctgaagtgcaattggtggaatcagggggaggacttgtgcagcctggaggatcgctgagactgtcatgtgccgtgtccggctttgccctgtccaaccacgggatgtcctgggtccgccgcgcgcctggaaagggcctcgaatgggtgtcgggtattgtgtacagcggtagcacctactatgccgcatccgtgaaggggagattcaccatcagccgggacaactccaggaacactctgtacctccaaatgaattcgctgaggccagaggacactgccatctactactgctccgcgcatggcggagagtccgacgtctggggacaggggaccaccgtgaccgtgtctagcaccacgacgccagcgccgcgaccaccaacaccggcgcccaccatcgcgtcgcagcccctgtccctgcgcccagaggcgtgccggccagcggcggggggcgcagtgcacacgagggggctggacttcgcctgtgatatctacatctgggcgcccttggccgggacttgtggggtccttctcctgtcactggttatcaccaaacggggcagaaagaaactcctgtatatattcaaacaaccatttatgagaccagtacaaactactcaagaggaagatggctgtagctgccgatttccagaagaagaagaaggaggatgtgaactgagagtgaagttcagcaggagcgcagacgcccccgcgtacaagcagggccagaaccagctctataacgagctcaatctaggacgaagagaggagtacgatgttttggacaagaggcgtggccgggaccctgagatggggggaaagccgagaaggaagaaccctcaggaaggcctgtacaatgaactgcagaaagataagatggcggaggcctacagtgagattgggatgaaaggcgagcgccggaggggcaaggggcacgatggcctttaccagggtctcagtacagccaccaaggacacctacgacgcccttcacatgcaggccctgccccctcgctaa

SEQ ID NO: 254 - DNA, 3545 bp, Artificial Sequence
  Synthesized
atggccttaccagtgaccgccttgctcctgccgctggccttgctgctccacgccgccaggccggatattgtgatgacccagtccccgtcctccctgaccgtgaccgcgggcgaaaaagtgaccatgatttgcaaatcctcccagtccctgctgaattccggcgatcagaaaaattatctgacctggtatcagcagaaaccgggccagccgccgaaactgctgattttttgggcgtccacccgtgaatccggcgtgccggatcgttttaccggctccggctccggcaccgattttaccctgaccatttcctccgtgcaggcggaagatctggcggtgtattattgccagaatgattattcctatccgctgacctttggcgcgggcaccaaactggaactgaaaggcggcggcggctccggcggcggcggctccggcggcggcggctcccaggtgcagctgcagcagtccgatgcggaactggtgaaaccgggctcctccgtgaaaatttcctgcaaagcgtccggctatacctttaccgatcatgcgattcattgggtgaaacagaaaccggaacagggcctggaatggattggccatttttccccgggcaataccgatattaaatataatgataaatttaaaggcaaagcgaccctgaccgtggatcgttcctcctccaccgcgtatatgcagctgaattccctgacctccgaagattccgcggtgtatttttgcaaaacctccacctttttttttgattattggggccagggcaccaccctgaccgtgtcctccaccacgacgccagcgccgcgaccaccaacaccggcgcccaccatcgcgtcgcagcccctgtccctgcgcccagaggcgtgccggccagcggcggggggcgcagtgcacacgagggggctggacttcgcctgtgatatctacatctgggcgcccttggccgggacttgtggggtccttctcctgtcactggttatcaccctttactgcaaacggggcagaaagaaactcctgtatatattcaaacaaccatttatgagaccagtacaaactactcaagaggaagatggctgtagctgccgatttccagaagaagaagaaggaggatgtgaactgagagtgaagttcagcaggagcgcagacgcccccgcgtacaagcagggccagaaccagctctataacgagctcaatctaggacgaagagaggagtacgatgttttggacaagaggcgtggccgggaccctgagatggggggaaagccgagaaggaagaaccctcaggaaggcctgtacaatgaactgcagaaagataagatggcggaggcctacagtgagattgggatgaaaggcgagcgccggaggggcaaggggcacgatggcctttaccagggtctcagtacagccaccaaggacacctacgacgcccttcacatgcaggccctgccccctcgctaatctagaggcgcgcccctctccctcccccccccctaacgttactggccgaagccgcttggaataaggccggtgtgcgtttgtctatatgttattttccaccatattgccgtcttttggcaatgtgagggcccggaaacctggccctgtcttcttgacgagcattcctaggggtctttcccctctcgccaaaggaatgcaaggtctgttgaatgtcgtgaaggaagcagttcctctggaagcttcttgaagacaaacaacgtctgtagcgaccctttgcaggcagcggaaccccccacctggcgacaggtgcctctgcggccaaaagccacgtgtataagatacacctgcaaaggcggcacaaccccagtgccacgttgtgagttggatagttgtggaaagagtcaaatggctctcctcaagcgtattcaacaaggggctgaaggatgcccagaaggtaccccattgtatgggatctgatctggggcctcggtacacatgctttacatgtgtttagtcgaggttaaaaaaacgtctaggccccccgaaccacggggacgtggttttcctttgaaaaacacgatgataatatggccacaacccatatgatggccttaccagtgaccgccttgctcctgccgctggccttgctgctccacgccgccaggccggagatcgtgatgacccagtcccccctgtccctgcccgtgacccccggcgagcccgcctccatctcctgccggtcctcccagtccctgctgcactccaacggctacaactacctggactggtacctgcagaagcccggccagtccccccagctgctgatctacctgggctccaaccgggcctccggcgtgcccgaccggttctccggctccggctccggcaccgacttcaccctgaagatctcccgggtggaggccgaggacgtgggcgtgtactactgcatgcaggccctgcagacccccaccttcggccccggcaccaaggtggacatcaagggcggcggcggctccggcggcggcggctccggcggcggcggctcccaggtgcagctggtgcagtccggcggcggcgtggtgcagcccggcaagtccctgcggctgtcctgcgccgcctccggcttcaccttctccatcttcgccatgcactgggtgcggcaggcccccggcaagggcctggagtgggtggccaccatctcctacgacggctccaacgccttctacgccgactccgtggagggccggttcaccatctcccgggacaactccaaggactccctgtacctgcagatggactccctgcggcccgaggacaccgccgtgtactactgcgtgaaggccggcgacggcggctacgacgtgttcgactcctggggccagggcaccctggtgaccgtgtcctccaccacgacgccagcgccgcgaccaccaacaccggcgcccaccatcgcgtcgcagcccctgtccctgcgcccagaggcgtgccggccagcggcggggggcgcagtgcacacgagggggctggacttcgcctgtgatatctacatctgggcgcccttggccgggacttgtggggtccttctcctgtcactggttatcaccctttactgcaaacggggcagaaagaaactcctgtatatattcaaacaaccatttatgagaccagtacaaactactcaagaggaagatggctgtagctgccgatttccagaagaagaagaaggaggatgtgaactgagagtgaagttcagcaggagcgcagacgcccccgcgtacaagcagggccagaaccagctctataacgagctcaatctaggacgaagagaggagtacgatgttttggacaagaggcgtggccgggaccctgagatggggggaaagccgagaaggaagaaccctcaggaaggcctgtacaatgaactgcagaaagataagatggcggaggcctacagtgagattgggatgaaaggcgagcgccggaggggcaaggggcacgatggcctttaccagggtctcagtacagccaccaaggacacctacgacgcccttcacatgcaggccctgccccctcgctaa

SEQ ID NO: 255 - protein, 490 aa, Artificial Sequence
  Synthesized
MALPVTALLLPLALLLHAARPEIVMTQSPLSLPVTPGEPASISCRSSQSLLHSNGYNYLDWYLQKPGQSPQLLIYLGSNRASGVPDRFSGSGSGTDFTLKISRVEAEDVGVYYCMQALQTPTFGPGTKVDIKGGGGSGGGGSGGGGSQVQLVQSGGGVVQPGKSLRLSCAASGFTFSIFAMHWVRQAPGKGLEWVATISYDGSNAFYADSVEGRFTISRDNSKDSLYLQMDSLRPEDTAVYYCVKAGDGGYDVFDSWGQGTLVTVSSTTTPAPRPPTPAPTIASQPLSLRPEACRPAAGGAVHTRGLDFACDIYIWAPLAGTCGVLLLSLVITLYCKRGRKKLLYIFKQPFMRPVQTTQEEDGCSCRFPEEEEGGCELRVKFSRSADAPAYQQGQNQLYNELNLGRREEYDVLDKRRGRDPEMGGKPRRKNPQEGLYNELQKDKMAEAYSEIGMKGERRRGKGHDGLYQGLSTATKDTYDALHMQALPPR

SEQ ID NO: 256 - DNA, 3536 bp, Artificial Sequence
  Synthesized
atggccttaccagtgaccgccttgctcctgccgctggccttgctgctccacgccgccaggccggatattgtgatgacccagtccccgtcctccctgaccgtgaccgcgggcgaaaaagtgaccatgatttgcaaatcctcccagtccctgctgaattccggcgatcagaaaaattatctgacctggtatcagcagaaaccgggccagccgccgaaactgctgattttttgggcgtccacccgtgaatccggcgtgccggatcgttttaccggctccggctccggcaccgattttaccctgaccatttcctccgtgcaggcggaagatctggcggtgtattattgccagaatgattattcctatccgctgacctttggcgcgggcaccaaactggaactgaaaggcggcggcggctccggcggcggcggctccggcggcggcggctcccaggtgcagctgcagcagtccgatgcggaactggtgaaaccgggctcctccgtgaaaatttcctgcaaagcgtccggctatacctttaccgatcatgcgattcattgggtgaaacagaaaccggaacagggcctggaatggattggccatttttccccgggcaataccgatattaaatataatgataaatttaaaggcaaagcgaccctgaccgtggatcgttcctcctccaccgcgtatatgcagctgaattccctgacctccgaagattccgcggtgtatttttgcaaaacctccacctttttttttgattattggggccagggcaccaccctgaccgtgtcctccaccacgacgccagcgccgcgaccaccaacaccggcgcccaccatcgcgtcgcagcccctgtccctgcgcccagaggcgtgccggccagcggcggggggcgcagtgcacacgagggggctggacttcgcctgtgatatctacatctgggcgcccttggccgggacttgtggggtccttctcctgtcactggttatcaccaaacggggcagaaagaaactcctgtatatattcaaacaaccatttatgagaccagtacaaactactcaagaggaagatggctgtagctgccgatttccagaagaagaagaaggaggatgtgaactgagagtgaagttcagcaggagcgcagacgcccccgcgtacaagcagggccagaaccagctctataacgagctcaatctaggacgaagagaggagtacgatgttttggacaagaggcgtggccgggaccctgagatggggggaaagccgagaaggaagaaccctcaggaaggcctgtacaatgaactgcagaaagataagatggcggaggcctacagtgagattgggatgaaaggcgagcgccggaggggcaaggggcacgatggcctttaccagggtctcagtacagccaccaaggacacctacgacgcccttcacatgcaggccctgccccctcgctaatctagaggcgcgcccctctccctcccccccccctaacgttactggccgaagccgcttggaataaggccggtgtgcgtttgtctatatgttattttccaccatattgccgtcttttggcaatgtgagggcccggaaacctggccctgtcttcttgacgagcattcctaggggtctttcccctctcgccaaaggaatgcaaggtctgttgaatgtcgtgaaggaagcagttcctctggaagcttcttgaagacaaacaacgtctgtagcgaccctttgcaggcagcggaaccccccacctggcgacaggtgcctctgcggccaaaagccacgtgtataagatacacctgcaaaggcggcacaaccccagtgccacgttgtgagttggatagttgtggaaagagtcaaatggctctcctcaagcgtattcaacaaggggctgaaggatgcccagaaggtaccccattgtatgggatctgatctggggcctcggtacacatgctttacatgtgtttagtcgaggttaaaaaaacgtctaggccccccgaaccacggggacgtggttttcctttgaaaaacacgatgataatatggccacaacccatatgatggccttaccagtgaccgccttgctcctgccgctggccttgctgctccacgccgccaggccggagatcgtgatgacccagtcccccctgtccctgcccgtgacccccggcgagcccgcctccatctcctgccggtcctcccagtccctgctgcactccaacggctacaactacctggactggtacctgcagaagcccggccagtccccccagctgctgatctacctgggctccaaccgggcctccggcgtgcccgaccggttctccggctccggctccggcaccgacttcaccctgaagatctcccgggtggaggccgaggacgtgggcgtgtactactgcatgcaggccctgcagacccccaccttcggccccggcaccaaggtggacatcaagggcggcggcggctccggcggcggcggctccggcggcggcggctcccaggtgcagctggtgcagtccggcggcggcgtggtgcagcccggcaagtccctgcggctgtcctgcgccgcctccggcttcaccttctccatcttcgccatgcactgggtgcggcaggcccccggcaagggcctggagtgggtggccaccatctcctacgacggctccaacgccttctacgccgactccgtggagggccggttcaccatctcccgggacaactccaaggactccctgtacctgcagatggactccctgcggcccgaggacaccgccgtgtactactgcgtgaaggccggcgacggcggctacgacgtgttcgactcctggggccagggcaccctggtgaccgtgtcctccaccacgacgccagcgccgcgaccaccaacaccggcgcccaccatcgcgtcgcagcccctgtccctgcgcccagaggcgtgccggccagcggcggggggcgcagtgcacacgagggggctggacttcgcctgtgatatctacatctgggcgcccttggccgggacttgtggggtccttctcctgtcactggttatcaccctttactgcaaacggggcagaaagaaactcctgtatatattcaaacaaccatttatgagaccagtacaaactactcaagaggaagatggctgtagctgccgatttccagaagaagaagaaggaggatgtgaactgagagtgaagttcagcaggagcgcagacgcccccgcgtacaagcagggccagaaccagctctataacgagctcaatctaggacgaagagaggagtacgatgttttggacaagaggcgtggccgggaccctgagatggggggaaagccgagaaggaagaaccctcaggaaggcctgtacaatgaactgcagaaagataagatggcggaggcctacagtgagattgggatgaaaggcgagcgccggaggggcaaggggcacgatggcctttaccagggtctcagtacagccaccaaggacacctacgacgcccttcacatgcaggccctgccccctcgctaa

SEQ ID NO: 257 - DNA, 3536 bp, Artificial Sequence
  Synthesized
atggccttaccagtgaccgccttgctcctgccgctggccttgctgctccacgccgccaggccggatattgtgatgacccagtccccgtcctccctgaccgtgaccgcgggcgaaaaagtgaccatgatttgcaaatcctcccagtccctgctgaattccggcgatcagaaaaattatctgacctggtatcagcagaaaccgggccagccgccgaaactgctgattttttgggcgtccacccgtgaatccggcgtgccggatcgttttaccggctccggctccggcaccgattttaccctgaccatttcctccgtgcaggcggaagatctggcggtgtattattgccagaatgattattcctatccgctgacctttggcgcgggcaccaaactggaactgaaaggcggcggcggctccggcggcggcggctccggcggcggcggctcccaggtgcagctgcagcagtccgatgcggaactggtgaaaccgggctcctccgtgaaaatttcctgcaaagcgtccggctatacctttaccgatcatgcgattcattgggtgaaacagaaaccggaacagggcctggaatggattggccatttttccccgggcaataccgatattaaatataatgataaatttaaaggcaaagcgaccctgaccgtggatcgttcctcctccaccgcgtatatgcagctgaattccctgacctccgaagattccgcggtgtatttttgcaaaacctccacctttttttttgattattggggccagggcaccaccctgaccgtgtcctccaccacgacgccagcgccgcgaccaccaacaccggcgcccaccatcgcgtcgcagcccctgtccctgcgcccagaggcgtgccggccagcggcggggggcgcagtgcacacgagggggctggacttcgcctgtgatatctacatctgggcgcccttggccgggacttgtggggtccttctcctgtcactggttatcaccctttactgcaaacggggcagaaagaaactcctgtatatattcaaacaaccatttatgagaccagtacaaactactcaagaggaagatggctgtagctgccgatttccagaagaagaagaaggaggatgtgaactgagagtgaagttcagcaggagcgcagacgcccccgcgtacaagcagggccagaaccagctctataacgagctcaatctaggacgaagagaggagtacgatgttttggacaagaggcgtggccgggaccctgagatggggggaaagccgagaaggaagaaccctcaggaaggcctgtacaatgaactgcagaaagataagatggcggaggcctacagtgagattgggatgaaaggcgagcgccggaggggcaaggggcacgatggcctttaccagggtctcagtacagccaccaaggacacctacgacgcccttcacatgcaggccctgccccctcgctaatctagaggcgcgcccctctccctcccccccccctaacgttactggccgaagccgcttggaataaggccggtgtgcgtttgtctatatgttattttccaccatattgccgtcttttggcaatgtgagggcccggaaacctggccctgtcttcttgacgagcattcctaggggtctttcccctctcgccaaaggaatgcaaggtctgttgaatgtcgtgaaggaagcagttcctctggaagcttcttgaagacaaacaacgtctgtagcgaccctttgcaggcagcggaaccccccacctggcgacaggtgcctctgcggccaaaagccacgtgtataagatacacctgcaaaggcggcacaaccccagtgccacgttgtgagttggatagttgtggaaagagtcaaatggctctcctcaagcgtattcaacaaggggctgaaggatgcccagaaggtaccccattgtatgggatctgatctggggcctcggtacacatgctttacatgtgtttagtcgaggttaaaaaaacgtctaggccccccgaaccacggggacgtggttttcctttgaaaaacacgatgataatatggccacaacccatatgatggccttaccagtgaccgccttgctcctgccgctggccttgctgctccacgccgccaggccggagatcgtgatgacccagtcccccctgtccctgcccgtgacccccggcgagcccgcctccatctcctgccggtcctcccagtccctgctgcactccaacggctacaactacctggactggtacctgcagaagcccggccagtccccccagctgctgatctacctgggctccaaccgggcctccggcgtgcccgaccggttctccggctccggctccggcaccgacttcaccctgaagatctcccgggtggaggccgaggacgtgggcgtgtactactgcatgcaggccctgcagacccccaccttcggccccggcaccaaggtggacatcaagggcggcggcggctccggcggcggcggctccggcggcggcggctcccaggtgcagctggtgcagtccggcggcggcgtggtgcagcccggcaagtccctgcggctgtcctgcgccgcctccggcttcaccttctccatcttcgccatgcactgggtgcggcaggcccccggcaagggcctggagtgggtggccaccatctcctacgacggctccaacgccttctacgccgactccgtggagggccggttcaccatctcccgggacaactccaaggactccctgtacctgcagatggactccctgcggcccgaggacaccgccgtgtactactgcgtgaaggccggcgacggcggctacgacgtgttcgactcctggggccagggcaccctggtgaccgtgtcctccaccacgacgccagcgccgcgaccaccaacaccggcgcccaccatcgcgtcgcagcccctgtccctgcgcccagaggcgtgccggccagcggcggggggcgcagtgcacacgagggggctggacttcgcctgtgatatctacatctgggcgcccttggccgggacttgtggggtccttctcctgtcactggttatcaccaaacggggcagaaagaaactcctgtatatattcaaacaaccatttatgagaccagtacaaactactcaagaggaagatggctgtagctgccgatttccagaagaagaagaaggaggatgtgaactgagagtgaagttcagcaggagcgcagacgcccccgcgtacaagcagggccagaaccagctctataacgagctcaatctaggacgaagagaggagtacgatgttttggacaagaggcgtggccgggaccctgagatggggggaaagccgagaaggaagaaccctcaggaaggcctgtacaatgaactgcagaaagataagatggcggaggcctacagtgagattgggatgaaaggcgagcgccggaggggcaaggggcacgatggcctttaccagggtctcagtacagccaccaaggacacctacgacgcccttcacatgcaggccctgccccctcgctaa

SEQ ID NO: 258 - protein, 487 aa, Artificial Sequence
  Synthesized
MALPVTALLLPLALLLHAARPEIVMTQSPLSLPVTPGEPASISCRSSQSLLHSNGYNYLDWYLQKPGQSPQLLIYLGSNRASGVPDRFSGSGSGTDFTLKISRVEAEDVGVYYCMQALQTPTFGPGTKVDIKGGGGSGGGGSGGGGSQVQLVQSGGGVVQPGKSLRLSCAASGFTFSIFAMHWVRQAPGKGLEWVATISYDGSNAFYADSVEGRFTISRDNSKDSLYLQMDSLRPEDTAVYYCVKAGDGGYDVFDSWGQGTLVTVSSTTTPAPRPPTPAPTIASQPLSLRPEACRPAAGGAVHTRGLDFACDIYIWAPLAGTCGVLLLSLVITKRGRKKLLYIFKQPFMRPVQTTQEEDGCSCRFPEEEEGGCELRVKFSRSADAPAYQQGQNQLYNELNLGRREEYDVLDKRRGRDPEMGGKPRRKNPQEGLYNELQKDKMAEAYSEIGMKGERRRGKGHDGLYQGLSTATKDTYDALHMQALPPR

SEQ ID NO: 259 - DNA, 3527 bp, Artificial Sequence
  Synthesized
atggccttaccagtgaccgccttgctcctgccgctggccttgctgctccacgccgccaggccggatattgtgatgacccagtccccgtcctccctgaccgtgaccgcgggcgaaaaagtgaccatgatttgcaaatcctcccagtccctgctgaattccggcgatcagaaaaattatctgacctggtatcagcagaaaccgggccagccgccgaaactgctgattttttgggcgtccacccgtgaatccggcgtgccggatcgttttaccggctccggctccggcaccgattttaccctgaccatttcctccgtgcaggcggaagatctggcggtgtattattgccagaatgattattcctatccgctgacctttggcgcgggcaccaaactggaactgaaaggcggcggcggctccggcggcggcggctccggcggcggcggctcccaggtgcagctgcagcagtccgatgcggaactggtgaaaccgggctcctccgtgaaaatttcctgcaaagcgtccggctatacctttaccgatcatgcgattcattgggtgaaacagaaaccggaacagggcctggaatggattggccatttttccccgggcaataccgatattaaatataatgataaatttaaaggcaaagcgaccctgaccgtggatcgttcctcctccaccgcgtatatgcagctgaattccctgacctccgaagattccgcggtgtatttttgcaaaacctccacctttttttttgattattggggccagggcaccaccctgaccgtgtcctccaccacgacgccagcgccgcgaccaccaacaccggcgcccaccatcgcgtcgcagcccctgtccctgcgcccagaggcgtgccggccagcggcggggggcgcagtgcacacgagggggctggacttcgcctgtgatatctacatctgggcgcccttggccgggacttgtggggtccttctcctgtcactggttatcaccaaacggggcagaaagaaactcctgtatatattcaaacaaccatttatgagaccagtacaaactactcaagaggaagatggctgtagctgccgatttccagaagaagaagaaggaggatgtgaactgagagtgaagttcagcaggagcgcagacgcccccgcgtacaagcagggccagaaccagctctataacgagctcaatctaggacgaagagaggagtacgatgttttggacaagaggcgtggccgggaccctgagatggggggaaagccgagaaggaagaaccctcaggaaggcctgtacaatgaactgcagaaagataagatggcggaggcctacagtgagattgggatgaaaggcgagcgccggaggggcaaggggcacgatggcctttaccagggtctcagtacagccaccaaggacacctacgacgcccttcacatgcaggccctgccccctcgctaatctagaggcgcgcccctctccctcccccccccctaacgttactggccgaagccgcttggaataaggccggtgtgcgtttgtctatatgttattttccaccatattgccgtcttttggcaatgtgagggcccggaaacctggccctgtcttcttgacgagcattcctaggggtctttcccctctcgccaaaggaatgcaaggtctgttgaatgtcgtgaaggaagcagttcctctggaagcttcttgaagacaaacaacgtctgtagcgaccctttgcaggcagcggaaccccccacctggcgacaggtgcctctgcggccaaaagccacgtgtataagatacacctgcaaaggcggcacaaccccagtgccacgttgtgagttggatagttgtggaaagagtcaaatggctctcctcaagcgtattcaacaaggggctgaaggatgcccagaaggtaccccattgtatgggatctgatctggggcctcggtacacatgctttacatgtgtttagtcgaggttaaaaaaacgtctaggccccccgaaccacggggacgtggttttcctttgaaaaacacgatgataatatggccacaacccatatgatggccttaccagtgaccgccttgctcctgccgctggccttgctgctccacgccgccaggccggagatcgtgatgacccagtcccccctgtccctgcccgtgacccccggcgagcccgcctccatctcctgccggtcctcccagtccctgctgcactccaacggctacaactacctggactggtacctgcagaagcccggccagtccccccagctgctgatctacctgggctccaaccgggcctccggcgtgcccgaccggttctccggctccggctccggcaccgacttcaccctgaagatctcccgggtggaggccgaggacgtgggcgtgtactactgcatgcaggccctgcagacccccaccttcggccccggcaccaaggtggacatcaagggcggcggcggctccggcggcggcggctccggcggcggcggctcccaggtgcagctggtgcagtccggcggcggcgtggtgcagcccggcaagtccctgcggctgtcctgcgccgcctccggcttcaccttctccatcttcgccatgcactgggtgcggcaggcccccggcaagggcctggagtgggtggccaccatctcctacgacggctccaacgccttctacgccgactccgtggagggccggttcaccatctcccgggacaactccaaggactccctgtacctgcagatggactccctgcggcccgaggacaccgccgtgtactactgcgtgaaggccggcgacggcggctacgacgtgttcgactcctggggccagggcaccctggtgaccgtgtcctccaccacgacgccagcgccgcgaccaccaacaccggcgcccaccatcgcgtcgcagcccctgtccctgcgcccagaggcgtgccggccagcggcggggggcgcagtgcacacgagggggctggacttcgcctgtgatatctacatctgggcgcccttggccgggacttgtggggtccttctcctgtcactggttatcaccaaacggggcagaaagaaactcctgtatatattcaaacaaccatttatgagaccagtacaaactactcaagaggaagatggctgtagctgccgatttccagaagaagaagaaggaggatgtgaactgagagtgaagttcagcaggagcgcagacgcccccgcgtacaagcagggccagaaccagctctataacgagctcaatctaggacgaagagaggagtacgatgttttggacaagaggcgtggccgggaccctgagatggggggaaagccgagaaggaagaaccctcaggaaggcctgtacaatgaactgcagaaagataagatggcggaggcctacagtgagattgggatgaaaggcgagcgccggaggggcaaggggcacgatggcctttaccagggtctcagtacagccaccaaggacacctacgacgcccttcacatgcaggccctgccccctcgctaa

SEQ ID NO: 260 - DNA, 3545 bp, Artificial Sequence
  Synthesized
atggccttaccagtgaccgccttgctcctgccgctggccttgctgctccacgccgccaggccggacatcgtgatgacccagtccccctccagcctgacagtgacagccggcgagaaggtgacaatgatctgtaagtccagccagagcctgctgaacagcggcgaccagaagaactacctgacctggtaccagcagaagcctggccagccccccaagctgctgatcttctgggccagcacaagggagagcggcgtgcccgacagattcacaggcagcggcagcggcaccgacttcacactgaccatttcctccgtgcaggccgaggacctcgccgtgtactactgccagaacgactactcctaccccctgacattcggcgccggcaccaaactggagctgaagggtggcggtggctcgggcggtggtgggtcgggtggcggcggatctcaggtgcagctccagcagtccgatgccgagctggtgaagcccggaagcagcgtcaagatcagctgtaaggcctccggctacaccttcacagaccacgccatccactgggtgaagcagaagcccgagcagggcctggagtggatcggccactttagccccggaaacaccgacatcaagtacaacgacaagttcaagggcaaggccaccctgaccgtggacaggagcagcagcaccgcctacatgcagctgaacagcctgacaagcgaggacagcgccgtgtacttctgcaagacctccaccttcttcttcgactactggggccagggaaccaccctgacagtgtccagcaccacgacgccagcgccgcgaccaccaacaccggcgcccaccatcgcgtcgcagcccctgtccctgcgcccagaggcgtgccggccagcggcggggggcgcagtgcacacgagggggctggacttcgcctgtgatatctacatctgggcgcccttggccgggacttgtggggtccttctcctgtcactggttatcaccctttactgcaaacggggcagaaagaaactcctgtatatattcaaacaaccatttatgagaccagtacaaactactcaagaggaagatggctgtagctgccgatttccagaagaagaagaaggaggatgtgaactgagagtgaagttcagcaggagcgcagacgcccccgcgtacaagcagggccagaaccagctctataacgagctcaatctaggacgaagagaggagtacgatgttttggacaagaggcgtggccgggaccctgagatggggggaaagccgagaaggaagaaccctcaggaaggcctgtacaatgaactgcagaaagataagatggcggaggcctacagtgagattgggatgaaaggcgagcgccggaggggcaaggggcacgatggcctttaccagggtctcagtacagccaccaaggacacctacgacgcccttcacatgcaggccctgccccctcgctaatctagaggcgcgcccctctccctcccccccccctaacgttactggccgaagccgcttggaataaggccggtgtgcgtttgtctatatgttattttccaccatattgccgtcttttggcaatgtgagggcccggaaacctggccctgtcttcttgacgagcattcctaggggtctttcccctctcgccaaaggaatgcaaggtctgttgaatgtcgtgaaggaagcagttcctctggaagcttcttgaagacaaacaacgtctgtagcgaccctttgcaggcagcggaaccccccacctggcgacaggtgcctctgcggccaaaagccacgtgtataagatacacctgcaaaggcggcacaaccccagtgccacgttgtgagttggatagttgtggaaagagtcaaatggctctcctcaagcgtattcaacaaggggctgaaggatgcccagaaggtaccccattgtatgggatctgatctggggcctcggtacacatgctttacatgtgtttagtcgaggttaaaaaaacgtctaggccccccgaaccacggggacgtggttttcctttgaaaaacacgatgataatatggccacaacccatatgatggccttaccagtgaccgccttgctcctgccgctggccttgctgctccacgccgccaggccggagatcgtgatgacccagtcccccctgtccctgcccgtgacccccggcgagcccgcctccatctcctgccggtcctcccagtccctgctgcactccaacggctacaactacctggactggtacctgcagaagcccggccagtccccccagctgctgatctacctgggctccaaccgggcctccggcgtgcccgaccggttctccggctccggctccggcaccgacttcaccctgaagatctcccgggtggaggccgaggacgtgggcgtgtactactgcatgcaggccctgcagacccccaccttcggccccggcaccaaggtggacatcaagggcggcggcggctccggcggcggcggctccggcggcggcggctcccaggtgcagctggtgcagtccggcggcggcgtggtgcagcccggcaagtccctgcggctgtcctgcgccgcctccggcttcaccttctccatcttcgccatgcactgggtgcggcaggcccccggcaagggcctggagtgggtggccaccatctcctacgacggctccaacgccttctacgccgactccgtggagggccggttcaccatctcccgggacaactccaaggactccctgtacctgcagatggactccctgcggcccgaggacaccgccgtgtactactgcgtgaaggccggcgacggcggctacgacgtgttcgactcctggggccagggcaccctggtgaccgtgtcctccaccacgacgccagcgccgcgaccaccaacaccggcgcccaccatcgcgtcgcagcccctgtccctgcgcccagaggcgtgccggccagcggcggggggcgcagtgcacacgagggggctggacttcgcctgtgatatctacatctgggcgcccttggccgggacttgtggggtccttctcctgtcactggttatcaccctttactgcaaacggggcagaaagaaactcctgtatatattcaaacaaccatttatgagaccagtacaaactactcaagaggaagatggctgtagctgccgatttccagaagaagaagaaggaggatgtgaactgagagtgaagttcagcaggagcgcagacgcccccgcgtacaagcagggccagaaccagctctataacgagctcaatctaggacgaagagaggagtacgatgttttggacaagaggcgtggccgggaccctgagatggggggaaagccgagaaggaagaaccctcaggaaggcctgtacaatgaactgcagaaagataagatggcggaggcctacagtgagattgggatgaaaggcgagcgccggaggggcaaggggcacgatggcctttaccagggtctcagtacagccaccaaggacacctacgacgcccttcacatgcaggccctgccccctcgctaa

SEQ ID NO: 261 - DNA, 3536 bp, Artificial Sequence
  Synthesized
atggccttaccagtgaccgccttgctcctgccgctggccttgctgctccacgccgccaggccggacatcgtgatgacccagtccccctccagcctgacagtgacagccggcgagaaggtgacaatgatctgtaagtccagccagagcctgctgaacagcggcgaccagaagaactacctgacctggtaccagcagaagcctggccagccccccaagctgctgatcttctgggccagcacaagggagagcggcgtgcccgacagattcacaggcagcggcagcggcaccgacttcacactgaccatttcctccgtgcaggccgaggacctcgccgtgtactactgccagaacgactactcctaccccctgacattcggcgccggcaccaaactggagctgaagggtggcggtggctcgggcggtggtgggtcgggtggcggcggatctcaggtgcagctccagcagtccgatgccgagctggtgaagcccggaagcagcgtcaagatcagctgtaaggcctccggctacaccttcacagaccacgccatccactgggtgaagcagaagcccgagcagggcctggagtggatcggccactttagccccggaaacaccgacatcaagtacaacgacaagttcaagggcaaggccaccctgaccgtggacaggagcagcagcaccgcctacatgcagctgaacagcctgacaagcgaggacagcgccgtgtacttctgcaagacctccaccttcttcttcgactactggggccagggaaccaccctgacagtgtccagcaccacgacgccagcgccgcgaccaccaacaccggcgcccaccatcgcgtcgcagcccctgtccctgcgcccagaggcgtgccggccagcggcggggggcgcagtgcacacgagggggctggacttcgcctgtgatatctacatctgggcgcccttggccgggacttgtggggtccttctcctgtcactggttatcaccaaacggggcagaaagaaactcctgtatatattcaaacaaccatttatgagaccagtacaaactactcaagaggaagatggctgtagctgccgatttccagaagaagaagaaggaggatgtgaactgagagtgaagttcagcaggagcgcagacgcccccgcgtacaagcagggccagaaccagctctataacgagctcaatctaggacgaagagaggagtacgatgttttggacaagaggcgtggccgggaccctgagatggggggaaagccgagaaggaagaaccctcaggaaggcctgtacaatgaactgcagaaagataagatggcggaggcctacagtgagattgggatgaaaggcgagcgccggaggggcaaggggcacgatggcctttaccagggtctcagtacagccaccaaggacacctacgacgcccttcacatgcaggccctgccccctcgctaatctagaggcgcgcccctctccctcccccccccctaacgttactggccgaagccgcttggaataaggccggtgtgcgtttgtctatatgttattttccaccatattgccgtcttttggcaatgtgagggcccggaaacctggccctgtcttcttgacgagcattcctaggggtctttcccctctcgccaaaggaatgcaaggtctgttgaatgtcgtgaaggaagcagttcctctggaagcttcttgaagacaaacaacgtctgtagcgaccctttgcaggcagcggaaccccccacctggcgacaggtgcctctgcggccaaaagccacgtgtataagatacacctgcaaaggcggcacaaccccagtgccacgttgtgagttggatagttgtggaaagagtcaaatggctctcctcaagcgtattcaacaaggggctgaaggatgcccagaaggtaccccattgtatgggatctgatctggggcctcggtacacatgctttacatgtgtttagtcgaggttaaaaaaacgtctaggccccccgaaccacggggacgtggttttcctttgaaaaacacgatgataatatggccacaacccatatgatggccttaccagtgaccgccttgctcctgccgctggccttgctgctccacgccgccaggccggagatcgtgatgacccagtcccccctgtccctgcccgtgacccccggcgagcccgcctccatctcctgccggtcctcccagtccctgctgcactccaacggctacaactacctggactggtacctgcagaagcccggccagtccccccagctgctgatctacctgggctccaaccgggcctccggcgtgcccgaccggttctccggctccggctccggcaccgacttcaccctgaagatctcccgggtggaggccgaggacgtgggcgtgtactactgcatgcaggccctgcagacccccaccttcggccccggcaccaaggtggacatcaagggcggcggcggctccggcggcggcggctccggcggcggcggctcccaggtgcagctggtgcagtccggcggcggcgtggtgcagcccggcaagtccctgcggctgtcctgcgccgcctccggcttcaccttctccatcttcgccatgcactgggtgcggcaggcccccggcaagggcctggagtgggtggccaccatctcctacgacggctccaacgccttctacgccgactccgtggagggccggttcaccatctcccgggacaactccaaggactccctgtacctgcagatggactccctgcggcccgaggacaccgccgtgtactactgcgtgaaggccggcgacggcggctacgacgtgttcgactcctggggccagggcaccctggtgaccgtgtcctccaccacgacgccagcgccgcgaccaccaacaccggcgcccaccatcgcgtcgcagcccctgtccctgcgcccagaggcgtgccggccagcggcggggggcgcagtgcacacgagggggctggacttcgcctgtgatatctacatctgggcgcccttggccgggacttgtggggtccttctcctgtcactggttatcaccctttactgcaaacggggcagaaagaaactcctgtatatattcaaacaaccatttatgagaccagtacaaactactcaagaggaagatggctgtagctgccgatttccagaagaagaagaaggaggatgtgaactgagagtgaagttcagcaggagcgcagacgcccccgcgtacaagcagggccagaaccagctctataacgagctcaatctaggacgaagagaggagtacgatgttttggacaagaggcgtggccgggaccctgagatggggggaaagccgagaaggaagaaccctcaggaaggcctgtacaatgaactgcagaaagataagatggcggaggcctacagtgagattgggatgaaaggcgagcgccggaggggcaaggggcacgatggcctttaccagggtctcagtacagccaccaaggacacctacgacgcccttcacatgcaggccctgccccctcgctaa

SEQ ID NO: 262 - DNA, 3536 bp, Artificial Sequence
  Synthesized
atggccttaccagtgaccgccttgctcctgccgctggccttgctgctccacgccgccaggccggacatcgtgatgacccagtccccctccagcctgacagtgacagccggcgagaaggtgacaatgatctgtaagtccagccagagcctgctgaacagcggcgaccagaagaactacctgacctggtaccagcagaagcctggccagccccccaagctgctgatcttctgggccagcacaagggagagcggcgtgcccgacagattcacaggcagcggcagcggcaccgacttcacactgaccatttcctccgtgcaggccgaggacctcgccgtgtactactgccagaacgactactcctaccccctgacattcggcgccggcaccaaactggagctgaagggtggcggtggctcgggcggtggtgggtcgggtggcggcggatctcaggtgcagctccagcagtccgatgccgagctggtgaagcccggaagcagcgtcaagatcagctgtaaggcctccggctacaccttcacagaccacgccatccactgggtgaagcagaagcccgagcagggcctggagtggatcggccactttagccccggaaacaccgacatcaagtacaacgacaagttcaagggcaaggccaccctgaccgtggacaggagcagcagcaccgcctacatgcagctgaacagcctgacaagcgaggacagcgccgtgtacttctgcaagacctccaccttcttcttcgactactggggccagggaaccaccctgacagtgtccagcaccacgacgccagcgccgcgaccaccaacaccggcgcccaccatcgcgtcgcagcccctgtccctgcgcccagaggcgtgccggccagcggcggggggcgcagtgcacacgagggggctggacttcgcctgtgatatctacatctgggcgcccttggccgggacttgtggggtccttctcctgtcactggttatcaccctttactgcaaacggggcagaaagaaactcctgtatatattcaaacaaccatttatgagaccagtacaaactactcaagaggaagatggctgtagctgccgatttccagaagaagaagaaggaggatgtgaactgagagtgaagttcagcaggagcgcagacgcccccgcgtacaagcagggccagaaccagctctataacgagctcaatctaggacgaagagaggagtacgatgttttggacaagaggcgtggccgggaccctgagatggggggaaagccgagaaggaagaaccctcaggaaggcctgtacaatgaactgcagaaagataagatggcggaggcctacagtgagattgggatgaaaggcgagcgccggaggggcaaggggcacgatggcctttaccagggtctcagtacagccaccaaggacacctacgacgcccttcacatgcaggccctgccccctcgctaatctagaggcgcgcccctctccctcccccccccctaacgttactggccgaagccgcttggaataaggccggtgtgcgtttgtctatatgttattttccaccatattgccgtcttttggcaatgtgagggcccggaaacctggccctgtcttcttgacgagcattcctaggggtctttcccctctcgccaaaggaatgcaaggtctgttgaatgtcgtgaaggaagcagttcctctggaagcttcttgaagacaaacaacgtctgtagcgaccctttgcaggcagcggaaccccccacctggcgacaggtgcctctgcggccaaaagccacgtgtataagatacacctgcaaaggcggcacaaccccagtgccacgttgtgagttggatagttgtggaaagagtcaaatggctctcctcaagcgtattcaacaaggggctgaaggatgcccagaaggtaccccattgtatgggatctgatctggggcctcggtacacatgctttacatgtgtttagtcgaggttaaaaaaacgtctaggccccccgaaccacggggacgtggttttcctttgaaaaacacgatgataatatggccacaacccatatgatggccttaccagtgaccgccttgctcctgccgctggccttgctgctccacgccgccaggccggagatcgtgatgacccagtcccccctgtccctgcccgtgacccccggcgagcccgcctccatctcctgccggtcctcccagtccctgctgcactccaacggctacaactacctggactggtacctgcagaagcccggccagtccccccagctgctgatctacctgggctccaaccgggcctccggcgtgcccgaccggttctccggctccggctccggcaccgacttcaccctgaagatctcccgggtggaggccgaggacgtgggcgtgtactactgcatgcaggccctgcagacccccaccttcggccccggcaccaaggtggacatcaagggcggcggcggctccggcggcggcggctccggcggcggcggctcccaggtgcagctggtgcagtccggcggcggcgtggtgcagcccggcaagtccctgcggctgtcctgcgccgcctccggcttcaccttctccatcttcgccatgcactgggtgcggcaggcccccggcaagggcctggagtgggtggccaccatctcctacgacggctccaacgccttctacgccgactccgtggagggccggttcaccatctcccgggacaactccaaggactccctgtacctgcagatggactccctgcggcccgaggacaccgccgtgtactactgcgtgaaggccggcgacggcggctacgacgtgttcgactcctggggccagggcaccctggtgaccgtgtcctccaccacgacgccagcgccgcgaccaccaacaccggcgcccaccatcgcgtcgcagcccctgtccctgcgcccagaggcgtgccggccagcggcggggggcgcagtgcacacgagggggctggacttcgcctgtgatatctacatctgggcgcccttggccgggacttgtggggtccttctcctgtcactggttatcaccaaacggggcagaaagaaactcctgtatatattcaaacaaccatttatgagaccagtacaaactactcaagaggaagatggctgtagctgccgatttccagaagaagaagaaggaggatgtgaactgagagtgaagttcagcaggagcgcagacgcccccgcgtacaagcagggccagaaccagctctataacgagctcaatctaggacgaagagaggagtacgatgttttggacaagaggcgtggccgggaccctgagatggggggaaagccgagaaggaagaaccctcaggaaggcctgtacaatgaactgcagaaagataagatggcggaggcctacagtgagattgggatgaaaggcgagcgccggaggggcaaggggcacgatggcctttaccagggtctcagtacagccaccaaggacacctacgacgcccttcacatgcaggccctgccccctcgctaa

SEQ ID NO: 263 - DNA, 3527 bp, Artificial Sequence
  Synthesized
atggccttaccagtgaccgccttgctcctgccgctggccttgctgctccacgccgccaggccggacatcgtgatgacccagtccccctccagcctgacagtgacagccggcgagaaggtgacaatgatctgtaagtccagccagagcctgctgaacagcggcgaccagaagaactacctgacctggtaccagcagaagcctggccagccccccaagctgctgatcttctgggccagcacaagggagagcggcgtgcccgacagattcacaggcagcggcagcggcaccgacttcacactgaccatttcctccgtgcaggccgaggacctcgccgtgtactactgccagaacgactactcctaccccctgacattcggcgccggcaccaaactggagctgaagggtggcggtggctcgggcggtggtgggtcgggtggcggcggatctcaggtgcagctccagcagtccgatgccgagctggtgaagcccggaagcagcgtcaagatcagctgtaaggcctccggctacaccttcacagaccacgccatccactgggtgaagcagaagcccgagcagggcctggagtggatcggccactttagccccggaaacaccgacatcaagtacaacgacaagttcaagggcaaggccaccctgaccgtggacaggagcagcagcaccgcctacatgcagctgaacagcctgacaagcgaggacagcgccgtgtacttctgcaagacctccaccttcttcttcgactactggggccagggaaccaccctgacagtgtccagcaccacgacgccagcgccgcgaccaccaacaccggcgcccaccatcgcgtcgcagcccctgtccctgcgcccagaggcgtgccggccagcggcggggggcgcagtgcacacgagggggctggacttcgcctgtgatatctacatctgggcgcccttggccgggacttgtggggtccttctcctgtcactggttatcaccaaacggggcagaaagaaactcctgtatatattcaaacaaccatttatgagaccagtacaaactactcaagaggaagatggctgtagctgccgatttccagaagaagaagaaggaggatgtgaactgagagtgaagttcagcaggagcgcagacgcccccgcgtacaagcagggccagaaccagctctataacgagctcaatctaggacgaagagaggagtacgatgttttggacaagaggcgtggccgggaccctgagatggggggaaagccgagaaggaagaaccctcaggaaggcctgtacaatgaactgcagaaagataagatggcggaggcctacagtgagattgggatgaaaggcgagcgccggaggggcaaggggcacgatggcctttaccagggtctcagtacagccaccaaggacacctacgacgcccttcacatgcaggccctgccccctcgctaatctagaggcgcgcccctctccctcccccccccctaacgttactggccgaagccgcttggaataaggccggtgtgcgtttgtctatatgttattttccaccatattgccgtcttttggcaatgtgagggcccggaaacctggccctgtcttcttgacgagcattcctaggggtctttcccctctcgccaaaggaatgcaaggtctgttgaatgtcgtgaaggaagcagttcctctggaagcttcttgaagacaaacaacgtctgtagcgaccctttgcaggcagcggaaccccccacctggcgacaggtgcctctgcggccaaaagccacgtgtataagatacacctgcaaaggcggcacaaccccagtgccacgttgtgagttggatagttgtggaaagagtcaaatggctctcctcaagcgtattcaacaaggggctgaaggatgcccagaaggtaccccattgtatgggatctgatctggggcctcggtacacatgctttacatgtgtttagtcgaggttaaaaaaacgtctaggccccccgaaccacggggacgtggttttcctttgaaaaacacgatgataatatggccacaacccatatgatggccttaccagtgaccgccttgctcctgccgctggccttgctgctccacgccgccaggccggagatcgtgatgacccagtcccccctgtccctgcccgtgacccccggcgagcccgcctccatctcctgccggtcctcccagtccctgctgcactccaacggctacaactacctggactggtacctgcagaagcccggccagtccccccagctgctgatctacctgggctccaaccgggcctccggcgtgcccgaccggttctccggctccggctccggcaccgacttcaccctgaagatctcccgggtggaggccgaggacgtgggcgtgtactactgcatgcaggccctgcagacccccaccttcggccccggcaccaaggtggacatcaagggcggcggcggctccggcggcggcggctccggcggcggcggctcccaggtgcagctggtgcagtccggcggcggcgtggtgcagcccggcaagtccctgcggctgtcctgcgccgcctccggcttcaccttctccatcttcgccatgcactgggtgcggcaggcccccggcaagggcctggagtgggtggccaccatctcctacgacggctccaacgccttctacgccgactccgtggagggccggttcaccatctcccgggacaactccaaggactccctgtacctgcagatggactccctgcggcccgaggacaccgccgtgtactactgcgtgaaggccggcgacggcggctacgacgtgttcgactcctggggccagggcaccctggtgaccgtgtcctccaccacgacgccagcgccgcgaccaccaacaccggcgcccaccatcgcgtcgcagcccctgtccctgcgcccagaggcgtgccggccagcggcggggggcgcagtgcacacgagggggctggacttcgcctgtgatatctacatctgggcgcccttggccgggacttgtggggtccttctcctgtcactggttatcaccaaacggggcagaaagaaactcctgtatatattcaaacaaccatttatgagaccagtacaaactactcaagaggaagatggctgtagctgccgatttccagaagaagaagaaggaggatgtgaactgagagtgaagttcagcaggagcgcagacgcccccgcgtacaagcagggccagaaccagctctataacgagctcaatctaggacgaagagaggagtacgatgttttggacaagaggcgtggccgggaccctgagatggggggaaagccgagaaggaagaaccctcaggaaggcctgtacaatgaactgcagaaagataagatggcggaggcctacagtgagattgggatgaaaggcgagcgccggaggggcaaggggcacgatggcctttaccagggtctcagtacagccaccaaggacacctacgacgcccttcacatgcaggccctgccccctcgctaa

SEQ ID NO: 264 - protein, 505 aa, Artificial Sequence
  Synthezied
DIVMTQSPSSLTVTAGEKVTMICKSSQSLLNSGDQKNYLTWYQQKPGQPPKLLIFWASTRESGVPDRFTGSGSGTDFTLTISSVQAEDLAVYYCQNDYSYPLTFGAGTKLELKGGGGSGGGGSGGGGSQVQLQQSDAELVKPGSSVKISCKASGYTFTDHAIHWVKQKPEQGLEWIGHFSPGNTDIKYNDKFKGKATLTVDRSSSTAYMQLNSLTSEDSAVYFCKTSTFFFDYWGQGTTLTVSSGGGGSGGGGSGGGGSDIVMTQAAFSNPVTLGTSASISCRSSKSLLHSNGITYFFWYLQKPGLSPQLLIYQMSNLASGVPDRFSSSGSGTDFTLRISRVEAEDVGVYYCAQNLELPPTFGGGTKLEIKRAGGGGSGGGGSGGGGSEVKLVESGGGLVQPGGSMKLSCVASGFTFSNYWMNWVRQSPEKGLEWVAEIRLKSNNYTTHYAESVKGRFTISRDDSKSSVSLQMNNLRVEDTGIYYCTRHYYFDYWGQGTTLTVSS

SEQ ID NO: 265 - protein, 505 aa, Artificial Sequence
  Synthesized
DIVMTQAAFSNPVTLGTSASISCRSSKSLLHSNGITYFFWYLQKPGLSPQLLIYQMSNLASGVPDRFSSSGSGTDFTLRISRVEAEDVGVYYCAQNLELPPTFGGGTKLEIKRAGGGGSGGGGSGGGGSEVKLVESGGGLVQPGGSMKLSCVASGFTFSNYWMNWVRQSPEKGLEWVAEIRLKSNNYTTHYAESVKGRFTISRDDSKSSVSLQMNNLRVEDTGIYYCTRHYYFDYWGQGTTLTVSSGGGGSGGGGSGGGGSDIVMTQSPSSLTVTAGEKVTMICKSSQSLLNSGDQKNYLTWYQQKPGQPPKLLIFWASTRESGVPDRFTGSGSGTDFTLTISSVQAEDLAVYYCQNDYSYPLTFGAGTKLELKGGGGSGGGGSGGGGSQVQLQQSDAELVKPGSSVKISCKASGYTFTDHAIHWVKQKPEQGLEWIGHFSPGNTDIKYNDKFKGKATLTVDRSSSTAYMQLNSLTSEDSAVYFCKTSTFFFDYWGQGTTLTVSS

SEQ ID NO: 266 - protein, 69 aa, Artificial Sequence; identical to SEQ ID NO: 30
  Synthesized

SEQ ID NO: 267 - protein, 66 aa, Artificial Sequence; identical to SEQ ID NO: 29
  Synthesized

SEQ ID NO: 268 - protein, 69 aa, Artificial Sequence; identical to SEQ ID NO: 2
  Synthesized

SEQ ID NO: 269 - protein, 72 aa, Artificial Sequence; identical to SEQ ID NO: 31
  Synthezied

SEQ ID NO: 270 - protein, 728 aa, Artificial Sequence
  Synthesized
DIVMTQSPSSLTVTAGEKVTMICKSSQSLLNSGDQKNYLTWYQQKPGQPPKLLIFWASTRESGVPDRFTGSGSGTDFTLTISSVQAEDLAVYYCQNDYSYPLTFGAGTKLELKGGGGSGGGGSGGGGSQVQLQQSDAELVKPGSSVKISCKASGYTFTDHAIHWVKQKPEQGLEWIGHFSPGNTDIKYNDKFKGKATLTVDRSSSTAYMQLNSLTSEDSAVYFCKTSTFFFDYWGQGTTLTVSSGGGGSGGGGSGGGGSDIVMTQAAFSNPVTLGTSASISCRSSKSLLHSNGITYFFWYLQKPGLSPQLLIYQMSNLASGVPDRFSSSGSGTDFTLRISRVEAEDVGVYYCAQNLELPPTFGGGTKLEIKRAGGGGSGGGGSGGGGSEVKLVESGGGLVQPGGSMKLSCVASGFTFSNYWMNWVRQSPEKGLEWVAEIRLKSNNYTTHYAESVKGRFTISRDDSKSSVSLQMNNLRVEDTGIYYCTRHYYFDYWGQGTTLTVSSTTTPAPRPPTPAPTIASQPLSLRPEACRPAAGGAVHTRGLDFACDIYIWAPLAGTCGVLLLSLVITLYCKRGRKKLLYIFKQPFMRPVQTTQEEDGCSCRFPEEEEGGCELRVKFSRSADAPAYQQGQNQLYNELNLGRREEYDVLDKRRGRDPEMGGKPRRKNPQEGLYNELQKDKMAEAYSEIGMKGERRRGKGHDGLYQGLSTATKDTYDALHMQALPPR

SEQ ID NO: 271 - protein, 725 aa, Artificial Sequence
  Synthesized
DIVMTQSPSSLTVTAGEKVTMICKSSQSLLNSGDQKNYLTWYQQKPGQPPKLLIFWASTRESGVPDRFTGSGSGTDFTLTISSVQAEDLAVYYCQNDYSYPLTFGAGTKLELKGGGGSGGGGSGGGGSQVQLQQSDAELVKPGSSVKISCKASGYTFTDHAIHWVKQKPEQGLEWIGHFSPGNTDIKYNDKFKGKATLTVDRSSSTAYMQLNSLTSEDSAVYFCKTSTFFFDYWGQGTTLTVSSGGGGSGGGGSGGGGSDIVMTQAAFSNPVTLGTSASISCRSSKSLLHSNGITYFFWYLQKPGLSPQLLIYQMSNLASGVPDRFSSSGSGTDFTLRISRVEAEDVGVYYCAQNLELPPTFGGGTKLEIKRAGGGGSGGGGSGGGGSEVKLVESGGGLVQPGGSMKLSCVASGFTFSNYWMNWVRQSPEKGLEWVAEIRLKSNNYTTHYAESVKGRFTISRDDSKSSVSLQMNNLRVEDTGIYYCTRHYYFDYWGQGTTLTVSSTTTPAPRPPTPAPTIASQPLSLRPEACRPAAGGAVHTRGLDFACDIYIWAPLAGTCGVLLLSLVITKRGRKKLLYIFKQPFMRPVQTTQEEDGCSCRFPEEEEGGCELRVKFSRSADAPAYQQGQNQLYNELNLGRREEYDVLDKRRGRDPEMGGKPRRKNPQEGLYNELQKDKMAEAYSEIGMKGERRRGKGHDGLYQGLSTATKDTYDALHMQALPPR

SEQ ID NO: 272 - protein, 728 aa, Artificial Sequence
  Synthesized
DIVMTQSPSSLTVTAGEKVTMICKSSQSLLNSGDQKNYLTWYQQKPGQPPKLLIFWASTRESGVPDRFTGSGSGTDFTLTISSVQAEDLAVYYCQNDYSYPLTFGAGTKLELKGGGGSGGGGSGGGGSQVQLQQSDAELVKPGSSVKISCKASGYTFTDHAIHWVKQKPEQGLEWIGHFSPGNTDIKYNDKFKGKATLTVDRSSSTAYMQLNSLTSEDSAVYFCKTSTFFFDYWGQGTTLTVSSGGGGSGGGGSGGGGSDIVMTQAAFSNPVTLGTSASISCRSSKSLLHSNGITYFFWYLQKPGLSPQLLIYQMSNLASGVPDRFSSSGSGTDFTLRISRVEAEDVGVYYCAQNLELPPTFGGGTKLEIKRAGGGGSGGGGSGGGGSEVKLVESGGGLVQPGGSMKLSCVASGFTFSNYWMNWVRQSPEKGLEWVAEIRLKSNNYTTHYAESVKGRFTISRDDSKSSVSLQMNNLRVEDTGIYYCTRHYYFDYWGQGTTLTVSSAKPTTTPAPRPPTPAPTIASQPLSLRPEACRPAAGGAVHTRGLDFACDIYIWAPLAGTCGVLLLSLVITKRGRKKLLYIFKQPFMRPVQTTQEEDGCSCRFPEEEEGGCELRVKFSRSADAPAYQQGQNQLYNELNLGRREEYDVLDKRRGRDPEMGGKPRRKNPQEGLYNELQKDKMAEAYSEIGMKGERRRGKGHDGLYQGLSTATKDTYDALHMQALPPR

SEQ ID NO: 273 - protein, 731 aa, Artificial Sequence
  Synthezied
DIVMTQSPSSLTVTAGEKVTMICKSSQSLLNSGDQKNYLTWYQQKPGQPPKLLIFWASTRESGVPDRFTGSGSGTDFTLTISSVQAEDLAVYYCQNDYSYPLTFGAGTKLELKGGGGSGGGGSGGGGSQVQLQQSDAELVKPGSSVKISCKASGYTFTDHAIHWVKQKPEQGLEWIGHFSPGNTDIKYNDKFKGKATLTVDRSSSTAYMQLNSLTSEDSAVYFCKTSTFFFDYWGQGTTLTVSSGGGGSGGGGSGGGGSDIVMTQAAFSNPVTLGTSASISCRSSKSLLHSNGITYFFWYLQKPGLSPQLLIYQMSNLASGVPDRFSSSGSGTDFTLRISRVEAEDVGVYYCAQNLELPPTFGGGTKLEIKRAGGGGSGGGGSGGGGSEVKLVESGGGLVQPGGSMKLSCVASGFTFSNYWMNWVRQSPEKGLEWVAEIRLKSNNYTTHYAESVKGRFTISRDDSKSSVSLQMNNLRVEDTGIYYCTRHYYFDYWGQGTTLTVSSAKPTTTPAPRPPTPAPTIASQPLSLRPEACRPAAGGAVHTRGLDFACDIYIWAPLAGTCGVLLLSLVITLYCKRGRKKLLYIFKQPFMRPVQTTQEEDGCSCRFPEEEEGGCELRVKFSRSADAPAYQQGQNQLYNELNLGRREEYDVLDKRRGRDPEMGGKPRRKNPQEGLYNELQKDKMAEAYSEIGMKGERRRGKGHDGLYQGLSTATKDTYDALHMQALPPR

SEQ ID NO: 274 - protein, 728 aa, Artificial Sequence
  Synthezied
DIVMTQAAFSNPVTLGTSASISCRSSKSLLHSNGITYFFWYLQKPGLSPQLLIYQMSNLASGVPDRFSSSGSGTDFTLRISRVEAEDVGVYYCAQNLELPPTFGGGTKLEIKRAGGGGSGGGGSGGGGSEVKLVESGGGLVQPGGSMKLSCVASGFTFSNYWMNWVRQSPEKGLEWVAEIRLKSNNYTTHYAESVKGRFTISRDDSKSSVSLQMNNLRVEDTGIYYCTRHYYFDYWGQGTTLTVSSGGGGSGGGGSGGGGSDIVMTQSPSSLTVTAGEKVTMICKSSQSLLNSGDQKNYLTWYQQKPGQPPKLLIFWASTRESGVPDRFTGSGSGTDFTLTISSVQAEDLAVYYCQNDYSYPLTFGAGTKLELKGGGGSGGGGSGGGGSQVQLQQSDAELVKPGSSVKISCKASGYTFTDHAIHWVKQKPEQGLEWIGHFSPGNTDIKYNDKFKGKATLTVDRSSSTAYMQLNSLTSEDSAVYFCKTSTFFFDYWGQGTTLTVSSTTTPAPRPPTPAPTIASQPLSLRPEACRPAAGGAVHTRGLDFACDIYIWAPLAGTCGVLLLSLVITLYCKRGRKKLLYIFKQPFMRPVQTTQEEDGCSCRFPEEEEGGCELRVKFSRSADAPAYQQGQNQLYNELNLGRREEYDVLDKRRGRDPEMGGKPRRKNPQEGLYNELQKDKMAEAYSEIGMKGERRRGKGHDGLYQGLSTATKDTYDALHMQALPPR

SEQ ID NO: 275 - protein, 725 aa, Artificial Sequence
  Synthezied
DIVMTQAAFSNPVTLGTSASISCRSSKSLLHSNGITYFFWYLQKPGLSPQLLIYQMSNLASGVPDRFSSSGSGTDFTLRISRVEAEDVGVYYCAQNLELPPTFGGGTKLEIKRAGGGGSGGGGSGGGGSEVKLVESGGGLVQPGGSMKLSCVASGFTFSNYWMNWVRQSPEKGLEWVAEIRLKSNNYTTHYAESVKGRFTISRDDSKSSVSLQMNNLRVEDTGIYYCTRHYYFDYWGQGTTLTVSSGGGGSGGGGSGGGGSDIVMTQSPSSLTVTAGEKVTMICKSSQSLLNSGDQKNYLTWYQQKPGQPPKLLIFWASTRESGVPDRFTGSGSGTDFTLTISSVQAEDLAVYYCQNDYSYPLTFGAGTKLELKGGGGSGGGGSGGGGSQVQLQQSDAELVKPGSSVKISCKASGYTFTDHAIHWVKQKPEQGLEWIGHFSPGNTDIKYNDKFKGKATLTVDRSSSTAYMQLNSLTSEDSAVYFCKTSTFFFDYWGQGTTLTVSSTTTPAPRPPTPAPTIASQPLSLRPEACRPAAGGAVHTRGLDFACDIYIWAPLAGTCGVLLLSLVITKRGRKKLLYIFKQPFMRPVQTTQEEDGCSCRFPEEEEGGCELRVKFSRSADAPAYQQGQNQLYNELNLGRREEYDVLDKRRGRDPEMGGKPRRKNPQEGLYNELQKDKMAEAYSEIGMKGERRRGKGHDGLYQGLSTATKDTYDALHMQALPPR

SEQ ID NO: 276 - protein, 728 aa, Artificial Sequence
  Synthezied
DIVMTQAAFSNPVTLGTSASISCRSSKSLLHSNGITYFFWYLQKPGLSPQLLIYQMSNLASGVPDRFSSSGSGTDFTLRISRVEAEDVGVYYCAQNLELPPTFGGGTKLEIKRAGGGGSGGGGSGGGGSEVKLVESGGGLVQPGGSMKLSCVASGFTFSNYWMNWVRQSPEKGLEWVAEIRLKSNNYTTHYAESVKGRFTISRDDSKSSVSLQMNNLRVEDTGIYYCTRHYYFDYWGQGTTLTVSSGGGGSGGGGSGGGGSDIVMTQSPSSLTVTAGEKVTMICKSSQSLLNSGDQKNYLTWYQQKPGQPPKLLIFWASTRESGVPDRFTGSGSGTDFTLTISSVQAEDLAVYYCQNDYSYPLTFGAGTKLELKGGGGSGGGGSGGGGSQVQLQQSDAELVKPGSSVKISCKASGYTFTDHAIHWVKQKPEQGLEWIGHFSPGNTDIKYNDKFKGKATLTVDRSSSTAYMQLNSLTSEDSAVYFCKTSTFFFDYWGQGTTLTVSSAKPTTTPAPRPPTPAPTIASQPLSLRPEACRPAAGGAVHTRGLDFACDIYIWAPLAGTCGVLLLSLVITKRGRKKLLYIFKQPFMRPVQTTQEEDGCSCRFPEEEEGGCELRVKFSRSADAPAYQQGQNQLYNELNLGRREEYDVLDKRRGRDPEMGGKPRRKNPQEGLYNELQKDKMAEAYSEIGMKGERRRGKGHDGLYQGLSTATKDTYDALHMQALPPR

SEQ ID NO: 277 - protein, 731 aa, Artificial Sequence
  Synthesized
DIVMTQAAFSNPVTLGTSASISCRSSKSLLHSNGITYFFWYLQKPGLSPQLLIYQMSNLASGVPDRFSSSGSGTDFTLRISRVEAEDVGVYYCAQNLELPPTFGGGTKLEIKRAGGGGSGGGGSGGGGSEVKLVESGGGLVQPGGSMKLSCVASGFTFSNYWMNWVRQSPEKGLEWVAEIRLKSNNYTTHYAESVKGRFTISRDDSKSSVSLQMNNLRVEDTGIYYCTRHYYFDYWGQGTTLTVSSGGGGSGGGGSGGGGSDIVMTQSPSSLTVTAGEKVTMICKSSQSLLNSGDQKNYLTWYQQKPGQPPKLLIFWASTRESGVPDRFTGSGSGTDFTLTISSVQAEDLAVYYCQNDYSYPLTFGAGTKLELKGGGGSGGGGSGGGGSQVQLQQSDAELVKPGSSVKISCKASGYTFTDHAIHWVKQKPEQGLEWIGHFSPGNTDIKYNDKFKGKATLTVDRSSSTAYMQLNSLTSEDSAVYFCKTSTFFFDYWGQGTTLTVSSAKPTTTPAPRPPTPAPTIASQPLSLRPEACRPAAGGAVHTRGLDFACDIYIWAPLAGTCGVLLLSLVITLYCKRGRKKLLYIFKQPFMRPVQTTQEEDGCSCRFPEEEEGGCELRVKFSRSADAPAYQQGQNQLYNELNLGRREEYDVLDKRRGRDPEMGGKPRRKNPQEGLYNELQKDKMAEAYSEIGMKGERRRGKGHDGLYQGLSTATKDTYDALHMQALPPR

SEQ ID NO: 278 - protein, 5 aa, Artificial Sequence
  Synthesized
GGGGS

SEQ ID NO: 279 - DNA, 1470 bp, Artificial Sequence
  Synthesized
atggccttaccagtgaccgccttgctcctgccgctggccttgctgctccacgccgccaggccgcagtccgtgctgacccagccaccttccgtgtctgccgctccaggccagaaggtgacaatcagctgctccggcagctcctctgacatcggaagcaactacgtgtcctggtaccagcagttcccaggcaccgcccccaagctgctgatctacgacaacaacaagaggcctagcgccatcccagatagattttctggcagcaagtccggaacctccgccacactgggcatcaccggactgcagacaggcgacgaggctgattactactgcggcacatgggattccaggctgggaatcgccgtgttcggaggaggaacccagctgacagtgctgggcggaggaggaggaagcggaggaggaggatccggaggaggaggatctgaggtgcagctggtgcagtctggcgccgaggtgaagaagcctggacagtctctgaagatcagctgtaaggcttccggctactctctgaccgacaactggatcggatgggtgcggcagaagccaggcaagggactggagtggatgggcatcatctacccaggagactctgatacacgctactctcccagctttcagggccaggtgaccatctccgccgataagtctatcaacacagcttacctgcagtggagctccctgaaggccagcgacaccgctatctactactgcgtgggcctggattggaactacaacccactgaggtactggggacctggaaccctggtgacagtgtctagcaccacgacgccagcgccgcgaccaccaacaccggcgcccaccatcgcgtcgcagcccctgtccctgcgcccagaggcgtgccggccagcggcggggggcgcagtgcacacgagggggctggacttcgcctgtgatatctacatctgggcgcccttggccgggacttgtggggtccttctcctgtcactggttatcaccctttactgcaaacggggcagaaagaaactcctgtatatattcaaacaaccatttatgagaccagtacaaactactcaagaggaagatggctgtagctgccgatttccagaagaagaagaaggaggatgtgaactgagagtgaagttcagcaggagcgcagacgcccccgcgtacaagcagggccagaaccagctctataacgagctcaatctaggacgaagagaggagtacgatgttttggacaagaggcgtggccgggaccctgagatggggggaaagccgagaaggaagaaccctcaggaaggcctgtacaatgaactgcagaaagataagatggcggaggcctacagtgagattgggatgaaaggcgagcgccggaggggcaaggggcacgatggcctttaccagggtctcagtacagccaccaaggacacctacgacgcccttcacatgcaggccctgccccctcgctaa

SEQ ID NO: 280 - protein, 196 aa, Artificial Sequence; identical to SEQ ID NO: 96
  Synthesized

SEQ ID NO: 281 - protein, 196 aa, Artificial Sequence; identical to SEQ ID NO: 98
  Synthesized

SEQ ID NO: 282 - protein, 196 aa, Flavobacterium ameridies; identical to SEQ ID NO: 97

SEQ ID NO: 283 - DNA, 24 bp, Homo sapiens
ggctcctgctgcatcgtagctgct

SEQ ID NO: 284 - protein, 7 aa, Artificial Sequence
  Synthesized
QRASLTR

SEQ ID NO: 285 - DNA, 24 bp, Homo sapiens
agctgccccttcgcggacgtggcc

SEQ ID NO: 286 - protein, 7 aa, Artificial Sequence
  Synthesized
DRSNLTR

SEQ ID NO: 287 - protein, 7 aa, Artificial Sequence
  Synthesized
RSDALSR

SEQ ID NO: 288 - protein, 7 aa, Artificial Sequence
  Synthesized
ERGTLAR

SEQ ID NO: 289 - DNA, 24 bp, Homo sapiens
tgccgcccctactgtggagatgga

SEQ ID NO: 290 - protein, 7 aa, Artificial Sequence
  Synthesized
TSGNLVR

SEQ ID NO: 291 - protein, 7 aa, Artificial Sequence
  Synthesized
QSGHLAR

SEQ ID NO: 292 - protein, 7 aa, Artificial Sequence
  Synthesized
RSDDLQR

SEQ ID NO: 293 - DNA, 24 bp, Homo sapiens
accatcaacagactggaagtgggg

SEQ ID NO: 294 - protein, 7 aa, Artificial Sequence
  Synthesized
QTVNLDR

SEQ ID NO: 295 - protein, 7 aa, Artificial Sequence
  Synthesized
KKDHLHR

SEQ ID NO: 296 - DNA, 24 bp, Homo sapiens
agctgccccttcgcggacgtggcc

SEQ ID NO: 297 - protein, 7 aa, Artificial Sequence
  Synthesized
HHNSLTR

SEQ ID NO: 298 - protein, 7 aa, Artificial Sequence
  Synthesized
MKHHLDA

SEQ ID NO: 299 - protein, 7 aa, Artificial Sequence
  Synthesized
DPSNLRR

SEQ ID NO: 300 - protein, 7 aa, Artificial Sequence
  Synthesized
RREVLEN

SEQ ID NO: 301 - protein, 7 aa, Artificial Sequence
  Synthesized
QSGSLTR

SEQ ID NO: 302 - protein, 7 aa, Artificial Sequence
  Synthesized
DRSDLTR

SEQ ID NO: 303 - protein, 7 aa, Artificial Sequence
  Synthesized
QSSALTR

SEQ ID NO: 304 - DNA, 24 bp, Homo sapiens
tgcggcaacctacatgatggggaa

SEQ ID NO: 305 - protein, 7 aa, Artificial Sequence
  Synthesized
QRSNLVR

SEQ ID NO: 306 - protein, 7 aa, Artificial Sequence
  Synthesized
RSDHLTR

SEQ ID NO: 307 - protein, 7 aa, Artificial Sequence
  Synthesized
TSANLSR

SEQ ID NO: 308 - protein, 7 aa, Artificial Sequence
  Synthesized
QSSDLTR

SEQ ID NO: 309 - protein, 7 aa, Artificial Sequence
  Synthesized
RSDNLAR

SEQ ID NO: 310 - protein, 7 aa, Artificial Sequence
  Synthesized
QSGHLQR

SEQ ID NO: 311 - DNA, 23 bp, Homo sapiens
agcctctccagccaggggctgag

SEQ ID NO: 312 - protein, 7 aa, Artificial Sequence
  Synthesized
RSDHLSR

SEQ ID NO: 313 - protein, 7 aa, Artificial Sequence
  Synthesized
RSDHLAR

SEQ ID NO: 314 - protein, 7 aa, Artificial Sequence
  Synthesized
QSGDLTR

SEQ ID NO: 315 - protein, 7 aa, Artificial Sequence
  Synthesized
RSDDLTR

SEQ ID NO: 316 - protein, 7 aa, Artificial Sequence
  Synthesized
RSDALTR

SEQ ID NO: 317 - protein, 7 aa, Artificial Sequence
  Synthesized
TSGHLVR

SEQ ID NO: 318 - protein, 7 aa, Artificial Sequence
  Synthesized
QSSDLQR

SEQ ID NO: 319 - DNA, 24 bp, Artificial Sequence
  Synthesized
ccctgccgcctgcctgctggtgtg

SEQ ID NO: 320 - protein, 7 aa, Artificial Sequence
  Synthesized
GGTALRM

SEQ ID NO: 321 - protein, 7 aa, Artificial Sequence
  Synthesized
QRSSLVR

SEQ ID NO: 322 - protein, 7 aa, Artificial Sequence
  Synthesized
QRNNLGR

SEQ ID NO: 323 - protein, 7 aa, Artificial Sequence
  Synthesized
RKRNLIM

SEQ ID NO: 324 - protein, 7 aa, Artificial Sequence
  Synthesized
VRHNLTR

SEQ ID NO: 325 - protein, 7 aa, Artificial Sequence
  Synthesized
RGDKLGP

SEQ ID NO: 326 - DNA, 24 bp, Homo sapiens
gtttacttcctttggggggattgc

SEQ ID NO: 327 - protein, 7 aa, Artificial Sequence
  Synthesized
SRFTLGR

SEQ ID NO: 328 - protein, 7 aa, Artificial Sequence
  Synthesized
RREHLVR

SEQ ID NO: 329 - protein, 7 aa, Artificial Sequence
  Synthesized
QTATLKR

SEQ ID NO: 330 - protein, 7 aa, Artificial sequence
  Synthesized
KHSNLAR

SEQ ID NO: 331 - protein, 7 aa, Artificial Sequence
  Synthesized
QSTTLKR

SEQ ID NO: 332 - protein, 7 aa, Artificial Sequence
  Synthesized
RADGLQL

SEQ ID NO: 333 - DNA, 24 bp, Artificial Sequence
  Synthesized
cacccctgcaccgactcggcagag

SEQ ID NO: 334 - protein, 7 aa, Artificial Sequence
  Synthesized
TRQKLET

SEQ ID NO: 335 - protein, 7 aa, Artificial Sequence
  Synthesized
RQDNLGR

SEQ ID NO: 336 - protein, 7 aa, Artificial Sequence
  Synthesized
QQHGLRH

SEQ ID NO: 337 - protein, 7 aa, Artificial Sequence
  Synthesized
TKKILTV

SEQ ID NO: 338 - protein, 7 aa, Artificial Sequence
  Synthesized
HKSSLTR

SEQ ID NO: 339 - protein, 7 aa, Artificial Sequence
  Synthesized
RSDHLSL

SEQ ID NO: 340 - DNA, 23 bp, Homo sapiens
accctcacaacctttgggttgtc

SEQ ID NO: 341 - protein, 7 aa, Artificial Sequence
  Synthesized
RKHHLGR

SEQ ID NO: 342 - protein, 7 aa, Artificial Sequence
  Synthesized
VSNSLAR

SEQ ID NO: 343 - protein, 7 aa, Artificial Sequence
  Synthesized
RTSSLKR

SEQ ID NO: 344 - protein, 7 aa, Artificial Sequence
  Synthesized
QRSDLTR

SEQ ID NO: 345 - protein, 7 aa, Artificial Sequence
  Synthesized
RSDGLRG

SEQ ID NO: 346 - DNA, 24 bp, Homo sapiens
ccccccagcaccctttcggctgtg

SEQ ID NO: 347 - protein, 7 aa, Artificial Sequence
  Synthesized
DSPTLRR

SEQ ID NO: 348 - protein, 7 aa, Artificial Sequence
  Synthesized
QSAHLKR

SEQ ID NO: 349 - protein, 7 aa, Artificial Sequence
  Synthesized
QDVSLVR

SEQ ID NO: 350 - protein, 7 aa, Artificial Sequence
  Synthesized
MKNTLTR

SEQ ID NO: 351 - protein, 7 aa, Artificial Sequence
  Synthesized
QSGTLTR

SEQ ID NO: 352 - DNA, 24 bp, Homo sapiens
ggctcctgctgcatcgtagctgct

SEQ ID NO: 353 - protein, 7 aa, Artificial Sequence
  Synthesized
TKQILGR

SEQ ID NO: 354 - protein, 7 aa, Artificial Sequence
  synthesized
RTEHLAR

SEQ ID NO: 355 - protein, 7 aa, Artificial Sequence
  Synthesized
KRRDLDR

SEQ ID NO: 356 - protein, 245 aa, Artificial Sequence
  Synthesized
QLTQSPSSVSASVGDRVTITCRASRGISSWLAWYQQKPGKAPKLLIYTASSLQSGVPSRFSGSGSGTDFTLTISSLQPEDFATYYCQQAYSFPRTFGQGTKVEIKGGGGSGGGGSGGGGSQVQLQESGPGLVKPSQTLSLTCTVSGGSISSGGYYWIWIRQHPGKGLEWIGYIYYNGNTYYNPSLKSRVTMSVDTSKNQFSLKLSSVTAADTAVYYCARDGITMIRGYYYGMDVWGQGTTVTVSS

SEQ ID NO: 357 - protein, 7 aa, Artificial Sequence
  Synthesized
RTSSLKR

SEQ ID NO: 358 - protein, 7 aa, Artificial Sequence
  Synthesized
QRSDLTR

SEQ ID NO: 359 - protein, 7 aa, Artificial Sequence
  Synthesized
RSDHLSL

SEQ ID NO: 360 - DNA, 25 bp, Homo sapiens
cacagcccaagatagttaagtgggg

SEQ ID NO: 361 - protein, 7 aa, Artificial Sequence
  Synthesized
KKDHLHR

SEQ ID NO: 362 - protein, 7 aa, Artificial Sequence
  Synthesized
RREVLEN

SEQ ID NO: 363 - protein, 7 aa, Artificial Sequence
  Synthesized
QRGNLNM

SEQ ID NO: 364 - protein, 7 aa, Artificial Sequence
  Synthesized
VPSKLKR

SEQ ID NO: 365 - protein, 7 aa, Artificial Sequence
  Synthesized
EAHHLSR

SEQ ID NO: 366 - protein, 7 aa, Artificial Sequence
  Synthesized
QDGNLTR

SEQ ID NO: 367 - protein, 7 aa, Artificial Sequence
  Synthesized
TSTLLNR

SEQ ID NO: 368 - protein, 7 aa, Artificial Sequence
  Synthesized
QQTNLTR

SEQ ID NO: 369 - protein, 7 aa, Artificial Sequence
  Synthesized
VGNSLTR

SEQ ID NO: 370 - protein, 7 aa, Artificial Sequence
  Synthesized
QSGSLTR

SEQ ID NO: 371 - protein, 7 aa, Artificial Sequence
  Synthesized
TSGNLVR

SEQ ID NO: 372 - protein, 7 aa, Artificial Sequence
  Synthesized
QSGDLTR

SEQ ID NO: 373 - protein, 7 aa, Artificial Sequence
  Synthesized
RSDNLAR

SEQ ID NO: 374 - protein, 7 aa, Artificial Sequence
  Synthesized
DRSDLTR

SEQ ID NO: 375 - protein, 7 aa, Artificial Sequence
  Synthesized
QSGHLQR

SEQ ID NO: 376 - protein, 7 aa, Artificial Sequence
  Synthesized
DRSHLTR

SEQ ID NO: 377 - protein, 7 aa, Artificial Sequence
  Synthesized
RSDALSR

SEQ ID NO: 378 - protein, 7 aa, Artificial Sequence
  Synthesized
QSSDLQR

SEQ ID NO: 379 - protein, 7 aa, Artificial Sequence
  Synthesized
ERGTLAR

SEQ ID NO: 380 - protein, 7 aa, Artificial Sequence
  Synthesized
RSDDLQR

SEQ ID NO: 381 - protein, 7 aa, Artificial Sequence
  Synthesized
RSDALTR

SEQ ID NO: 382 - protein, 7 aa, Artificial Sequence
  Synthesized
RSDHLAR

SEQ ID NO: 383 - protein, 7 aa, Artificial Sequence
  Synthesized
QSGDLTR

SEQ ID NO: 384 - protein, 7 aa, Artificial Sequence
  Synthesized
QSGHLQR

SEQ ID NO: 385 - protein, 7 aa, Artificial Sequence
  Synthesized
QSSDLTR

SEQ ID NO: 386 - protein, 7 aa, Artificial Sequence
  Synthesized
QSSDLTR

SEQ ID NO: 387 - protein, 7 aa, Artificial Sequence
  Synthesized
RSDHLSR

SEQ ID NO: 388 - protein, 7 aa, Artificial Sequence
  Synthesized
QSGHLAR

SEQ ID NO: 389 - protein, 7 aa, Artificial Sequence
  Synthesized
DRSDLTR

SEQ ID NO: 390 - protein, 7 aa, Artificial Sequence
  Synthesized
QSGNLAR

SEQ ID NO: 391 - protein, 7 aa, Artificial Sequence
  Synthesized
DRSHLTR

SEQ ID NO: 392 - protein, 7 aa, Artificial Sequence
  Synthesized
QSGDLTR

SEQ ID NO: 393 - protein, 7 aa, Artificial Sequence
  Synthesized
QSGHLQR

SEQ ID NO: 394 - protein, 7 aa, Artificial Sequence
  Synthesized
RSHILTN

SEQ ID NO: 395 - protein, 7 aa, Artificial Sequence
  Synthesized
QSTTLKR

SEQ ID NO: 396 - protein, 7 aa, Artificial Sequence
  Synthesized
DGGHLTR

SEQ ID NO: 397 - protein, 7 aa, Artificial Sequence
  Synthesized
RQMNLDR

SEQ ID NO: 398 - protein, 7 aa, Artificial Sequence
  Synthesized
RQDNLGR

SEQ ID NO: 399 - protein, 7 aa, Artificial Sequence
  Synthesized
DKSVLAR

SEQ ID NO: 400 - DNA, 23 bp, Homo sapiens
gccaccttcccccagctgaagtc

SEQ ID NO: 401 - DNA, 24 bp, Homo sapiens
tgcatctgcgacgtgggagccgag

SEQ ID NO: 402 - DNA, 23 bp, Homo sapiens
gcccacagccactcgtggcggcc

SEQ ID NO: 403 - DNA, 23 bp, Homo sapiens
ccctgctccctccgggggctgct

SEQ ID NO: 404 - DNA, 23 bp, Homo sapiens
tccggcttctccatggagcaggc

SEQ ID NO: 405 - DNA, 24 bp, Homo sapiens
cactgcgcccacgaggccgaggag

SEQ ID NO: 406 - protein, 7 aa, Artificial Sequence
  Synthesized
HKWVLRQ

SEQ ID NO: 407 - protein, 7 aa, Artificial Sequence
  Synthesized
DRSNLTR

SEQ ID NO: 408 - DNA, 19 bp, Homo sapiens
gttgctccaggccacagca

SEQ ID NO: 409 - protein, 7 aa, Artificial Sequence
  Synthesized
QSGDLTR

SEQ ID NO: 410 - protein, 7 aa, Artificial Sequence
  Synthesized
QWGTRYR

SEQ ID NO: 411 - protein, 7 aa, Artificial Sequence
  Synthesized
ERGTLAR

SEQ ID NO: 412 - protein, 7 aa, Artificial Sequence
  Synthesized
QSGDLTR

SEQ ID NO: 413 - protein, 7 aa, Artificial Sequence
  Synthesized
TSGALTR

SEQ ID NO: 414 - DNA, 12 bp, Homo sapiens
gactttgcatgt

SEQ ID NO: 415 - protein, 7 aa, Artificial Sequence
  Synthesized
WRSSLAS

SEQ ID NO: 416 - protein, 7 aa, Artificial Sequence
  Synthesized
QSGSLTR

SEQ ID NO: 417 - protein, 9 aa, Artificial Sequence
  Synthesized
TGPGAAARA

SEQ ID NO: 418 - protein, 5 aa, Artificial Sequence
  Synthesized
LRGSQ

SEQ ID NO: 419 - DNA, 18 bp, Homo sapiens
ctccagccaggtccatct

SEQ ID NO: 420 - DNA, 17 bp, Homo sapiens
tctccagccaggtccat

SEQ ID NO: 421 - DNA, 15 bp, Homo sapiens
tcagcaggctgttgt

SEQ ID NO: 422 - DNA, 17 bp, Homo sapiens
tcagcaggctgttgtgt

SEQ ID NO: 423 - DNA, 15 bp, Homo sapiens
ccctggtctcttcat

SEQ ID NO: 424 - DNA, 16 bp, Homo sapiens
aagcctccctggtctt

SEQ ID NO: 425 - DNA, 15 bp, Homo sapiens
aagcctccctggtct

SEQ ID NO: 426 - DNA, 17 bp, Homo sapiens
gctgaccccctgtgcct

SEQ ID NO: 427 - DNA, 16 bp, Homo sapiens
gaccccctgtgcctct
